(19) United States
(12) Patent Application Publication
(10) Pub. No.: US 2025/0109401 A1
(43) Pub. Date: Apr. 3, 2025

(54) COMPOSITIONS AND METHODS FOR IMMUNOONCOLOGY

(71) Applicants: NOVARTIS AG, Basel (CH); INTELLIA THERAPEUTICS, INC., Cambridge, MA (US)

(72) Inventors: Jennifer BROGDON, Sudbury, MA (US); Ming-Wei CHEN, Cambridge, MA (US); Hyungwook LIM, Cambridge, MA (US); Yi YANG, Belmont, MA (US); Morag STEWART, Boston, MA (US); Sarah HESSE, Cambridge, MA (US)

(21) Appl. No.: 18/486,393

(22) Filed: Oct. 13, 2023

Related U.S. Application Data
(63) Continuation of application No. 16/498,361, filed on Sep. 26, 2019, now Pat. No. 11,851,659.
(60) Provisional application No. 62/475,024, filed on Mar. 22, 2017.

(51) Int. Cl. C12N 15/113; A61K 39/00; C07K 14/705; C12N 9/22; C12N 15/86

(52) U.S. Cl. CPC C12N 15/1138; A61K 40/11; A61K 40/31; A61K 40/4215; C07K 14/70503; C07K 14/70578; C12N 9/22; C12N 15/86; C07K 2319/30; C07K 2319/33; C12N 2310/20; C12N 2750/14143; C12N 2800/80

(57) ABSTRACT

The present disclosure is directed to genome editing systems, reagents and methods for immunooncology.

### RELATED APPLICATIONS

[0001] This application claims priority to U.S. Provisional patent application No. 62/475,024, filed Mar. 22, 2017. The entire content of this application is incorporated herein by reference.

### SEQUENCE LISTING

[0002] The instant application contains a Sequence Listing which has been submitted electronically in ASCII format and is hereby incorporated by reference in its entirety. Said ASCII copy, created on Mar. 15, 2018, is named PAT057662-WO-PCT_SL.txt and is 3,460,141 bytes in size.

### BACKGROUND

[0003] CRISPRs (Clustered Regularly Interspaced Short Palindromic Repeats) evolved in bacteria as an adaptive immune system to defend against viral attack. Upon exposure to a virus, short segments of viral DNA are integrated into the CRISPR locus of the bacterial genome. RNA is transcribed from a portion of the CRISPR locus that includes the viral sequence. That RNA, which comprises a sequence complementary to the viral genome, mediates targeting of a Cas9 protein to the sequence in the viral genome. The Cas9 protein cleaves and thereby silences the viral target.

[0004] Recently, the CRISPR/Cas system has been adapted for genome editing in eukaryotic cells. The introduction of site-specific single-strand breaks (SSBs) or double-strand breaks (DSBs) allows for target sequence alteration through, for example, non-homologous end-joining (NHEJ) or homology-directed repair (HDR).

### SUMMARY

[0005] In an aspect, the disclosure provides a gRNA molecule including a tracr and crRNA, wherein the crRNA includes a targeting domain that is complementary with a target sequence of a TET2 intron or TET2 intron-exon junction.

[0006] In an aspect, the disclosure provides a gRNA molecule, wherein the targeting domain is complementary to a sequence within a genomic region selected from: a) chr4: 105146980-105190359; b) chr4: 105190506-105233896; c) chr4: 105237352-105241338; d) chr4: 105241430-105242833; e) chr4: 105242928-105243569; f) chr4: 105243779-105259618; g) chr4: 105259770-105261758; h) chr4: 105261849-105269609; i) chr4: 105269748-105272563; and j) chr4: 105272919-105275047, wherein said genomic region is according to human reference genome hg38, for example, wherein the genomic region is chr4: 105269748-105272563 (the intron between exon 9 and exon 10 of TET2).

[0007] In an aspect, the disclosure provides a gRNA molecule, wherein the targeting domain is complementary to a sequence within a genomic region selected from chr4: 105270624-105270643; chr4: 105270630-105270649; chr4: 105271863-105271883; chr4: 105271340-105271360; chr4: 105271204-105271223; chr4: 105271526-105271546; chr4: 105270350-105270370; chr4: 105270268-105270288; chr4: 105272182-105272202; chr4: 105272465-105272485; chr4: 105271387-105271407; chr4: 105272436-105272456; chr4: 105271924-105271944; chr4: 105272323-105272343; chr4: 105272057-105272077; chr4: 105272309-105272329; chr4: 105272324-105272344; chr4: 105272324-105272344; chr4: 105271184-105271204; chr4: 105271190-105271210; chr4: 105271295-105271315; chr4: 105271292-105271312; chr4: 105271458-105271478; chr4: 105270635-105270655; chr4: 105271173-105271192; chr4: 105271232-105271252; chr4: 105271845-105271865; chr4: 105271849-105271869; and chr4: 105271056-105271076.

[0008] In an aspect, the disclosure provides a gRNA molecule, wherein the targeting domain is complementary to a sequence within a genomic region selected from chr4: 105270624-105270643; chr4: 105270630-105270649; chr4: 105271387-105271407; chr4: 105271924-105271944; chr4: 105272323-105272343; chr4: 105272057-105272077; chr4: 105272309-105272329; chr4: 105272324-105272344; chr4: 105272324-105272344; chr4: 105271184-105271204; chr4: 105271190-105271210; chr4: 105271295-105271315; chr4: 105271292-105271312; chr4: 105271458-105271478; chr4: 105270635-105270655; chr4: 105271173-105271192; chr4: 105271232-105271252; and chr4: 105271056-105271076.

[0009] In an aspect, the disclosure provides a gRNA molecule, wherein the targeting domain is complementary to a sequence within a genomic region selected from chr4: 105271863-105271883; chr4: 105271340-105271360; chr4: 105271204-105271223; chr4: 105271526-105271546; chr4: 105270350-105270370; chr4: 105270268-105270288; chr4: 105272182-105272202; and chr4: 105272465-105272485. In some embodiments, the gRNA molecule is capable of generating the editing repair pattern described in Table 22 and/or >75% indel frequencies as described in Table 23.

[0010] In an aspect, the disclosure provides a gRNA molecule, wherein the targeting domain is complementary to a sequence within a genomic region selected from chr4: 105271340-105271360; chr4: 105271526-105271546; chr4: 105270350-105270370; chr4: 105270268-105270288; chr4: 105272182-105272202; and chr4: 105272465-105272485. In some embodiments, the gRNA molecule is capable of generating the editing repair pattern described in Table 22 and/or >80% indel frequencies as described in Table 23.

[0011] In an aspect, the disclosure provides a gRNA molecule, wherein the targeting domain is complementary to a sequence within a genomic region selected from chr4: 105270624-105270643, chr4: 105270630-105270649, and chr4: 105271863-105271883. In an aspect, including in any of the previous aspects, a gRNA molecule of the disclosure includes a targeting domain includes, e.g., consists of, any one of SEQ ID NO: 1000 to SEQ ID NO: 10514, e.g., of Table 1 or Table 2, e.g., includes, e.g., consists of, any one of SEQ ID NO: 10102 to SEQ ID NO: 10324.

[0012] In an aspect of the gRNA molecule, including in any of the previous aspects, a gRNA molecule of the disclosure includes a targeting domain that includes, e.g., consists of, a targeting domain sequence listed in Table 2, for example, includes, e.g., consists of, any one of SEQ ID NO: 10148, SEQ ID NO: 10184, SEQ ID NO: 10185, SEQ ID NO: 10188, SEQ ID NO: 10209, SEQ ID NO: 10212, SEQ ID NO: 10317, SEQ ID NO: 10318, SEQ ID NO: 10187, SEQ ID NO: 10224, SEQ ID NO: 10292, SEQ ID NO: 10149, SEQ ID NO: 10177, SEQ ID NO: 10151, SEQ ID NO: 10225 or SEQ ID NO: 10509.

[0013] In an aspect of the gRNA, including in any of the previous aspects, a gRNA molecule of the disclosure includes a targeting domain that comprises or consists of SEQ ID NO: 10148, 10149, 10206, 10191, 10515, 10203, 10259, 10136, 10314, 10234, 10290, 10233, 10209, 10224, 10212, 10317, 10318, 10225, 10184, 10185, 10188, 10187, 10292, 10151, 10509, 10281, 10299, 10301, or 10177; or a fragment thereof.

[0014] In an aspect of the gRNA, including in any of the previous aspects, a gRNA molecule of the disclosure includes a targeting domain that comprises or consists of SEQ ID NO: 10148, 10149, 10290, 10209, 10224, 10212, 10317, 10318, 10225, 10184, 10185, 10188, 10187, 10292, 10151, 10509, 10281, or 10177; or a fragment thereof.

[0015] In an aspect of the gRNA, including in any of the previous aspects, a gRNA molecule of the disclosure includes a targeting domain that comprises or consists of SEQ ID NO: 10206, 10191, 10515, 10203, 10259, 10136, 10314, or 10234; or a fragment thereof.

[0016] In an aspect of the gRNA, including in any of the previous aspects, a gRNA molecule of the disclosure includes a targeting domain that comprises or consists of SEQ ID NO: 10191, 10203, 10259, 10136, 10314, or 10234; or a fragment thereof. In some embodiments, the gRNA molecule is capable of generating the editing repair pattern described in Table 22 and/or >75% indel frequencies as described in Table 23.

[0017] In an aspect of the gRNA, including in any of the previous aspects, a gRNA molecule of the disclosure includes a targeting domain that comprises or consists of SEQ ID NO: 10148, SEQ ID NO: 10149, or SEQ ID NO: 10206; or a fragment thereof. In some embodiments, the gRNA molecule is capable of generating the editing repair pattern described in Table 22 and/or >80% indel frequencies as described in Table 23.

[0018] In some embodiments, the gRNA molecules are capable of generating the editing repair pattern described in Table 22 and/or the indel frequencies described in Table 23. In an aspect of the gRNA molecule, including in any of the previous aspects, the targeting domain includes 17, 18, 19 or, 20 consecutive nucleic acids of any one of the recited targeting domain sequences. In an aspect, including in any of the previous aspects, the targeting domain consists of 17, 18, 19, or 20 consecutive nucleic acids of any one of the recited targeting domain sequences. In an aspect, the 17, 18, 19, or 20 consecutive nucleic acids of any one of the recited targeting domain sequences are the 17, 18, 19, or 20 consecutive nucleic acids disposed at 3′ end of the recited targeting domain sequence. In another aspect, the 17, 18, 19, or 20 consecutive nucleic acids of any one of the recited targeting domain sequences are the 17, 18, 19, or 20 consecutive nucleic acids disposed at the 5′ end of the recited targeting domain sequence. In another aspect, the 17, 18, 19, or 20 consecutive nucleic acids of any one of the recited targeting domain sequences do not include either 5′ or 3′ nucleic acid of the recited targeting domain sequence.

[0019] In an aspect of the gRNA molecule, including in any of the previous aspects, the targeting domain consists of the recited targeting domain sequence.

[0020] In an aspect of the gRNA molecule, including in any of the previous aspects, a portion of the crRNA and a portion of the tracr hybridize to form a flagpole including SEQ ID NO: 50 or SEQ ID NO: 51. In an aspect of the gRNA molecule, including in any of the previous aspects, the flagpole further includes a first flagpole extension, located 3′ to the crRNA portion of the flagpole, wherein said first flagpole extension includes SEQ ID NO: 55. In an aspect of the gRNA molecule, including in any of the previous aspects, the flagpole further includes a second flagpole extension located 3′ to the crRNA portion of the flagpole and, if present, the first flagpole extension, wherein said second flagpole extension includes SEQ ID NO: 57.

[0021] In an aspect of the gRNA molecule, including in any of the previous aspects, the tracr includes: (a) SEQ ID NO: 87, optionally further including, at 3′ end, an additional 1, 2, 3, 4, 5, 6, or 7 uracil (U) nucleotides; (b) SEQ ID NO: 65; or (c) SEQ ID NO: 84.

[0022] In an aspect of the gRNA molecule, including in any of the previous aspects, the crRNA portion of the flagpole includes SEQ ID NO: 79 or SEQ ID NO: 80.

[0023] In an aspect of the gRNA molecule, including in any of the previous aspects, the tracr includes SEQ ID NO: 53 or SEQ ID NO: 54, and optionally, if a first flagpole extension is present, a first tracr extension, disposed 5′ to SEQ ID NO: 53 or SEQ ID NO: 54, said first tracr extension including SEQ ID NO: 56.

[0024] In an aspect of the gRNA molecule, including in any of the previous aspects, the targeting domain and the tracr are disposed on separate nucleic acid molecules.

[0025] In an aspect of the gRNA molecule, including in any of the previous aspects, the crRNA includes, from 5′ to 3′, [targeting domain]-: a) SEQ ID NO: 50; b) SEQ ID NO: 51; c) SEQ ID NO: 77; d) SEQ ID NO: 78; e) SEQ ID NO: 79; f) SEQ ID NO: 80; or g) SEQ ID NO: 81.

[0026] In an aspect of the gRNA molecule, including in any of the previous aspects, the tracr includes, from 5′ to 3′: a) SEQ ID NO: 53; b) SEQ ID NO: 54; c) SEQ ID NO: 82; d) SEQ ID NO: 83; e) SEQ ID NO: 65; f) SEQ ID NO: 84; g) SEQ ID NO: 87; h) SEQ ID NO: 76; i) SEQ ID NO: 85; j) SEQ ID NO: 86; k) any of a) to j), above, further including, at 3′ end, at least 1, 2, 3, 4, 5, 6 or 7 uracil (U) nucleotides, e.g., 1, 2, 3, 4, 5, 6, or 7 uracil (U) nucleotides; 1) any of a) to k), above, further including, at 3′ end, at least 1, 2, 3, 4, 5, 6 or 7 adenine (A) nucleotides, e.g., 1, 2, 3, 4, 5, 6, or 7 adenine (A) nucleotides; or m) any of a) to 1), above, further including, at the 5′ end (e.g., at the 5′ terminus), at least 1, 2, 3, 4, 5, 6 or 7 adenine (A) nucleotides, e.g., 1, 2, 3, 4, 5, 6, or 7 adenine (A) nucleotides.

[0027] In an aspect of the gRNA molecule, including in any of the previous aspects, the targeting domain and the tracr are disposed on separate nucleic acid molecules, and wherein the nucleic acid molecule including the targeting domain includes SEQ ID NO: 79, optionally disposed immediately 3′ to the targeting domain, and the nucleic acid molecule including the tracr includes, e.g., consists of, SEQ ID NO: 65.

[0028] In an aspect of the gRNA molecule, including in any of the previous aspects, the targeting domain and the tracr are disposed on a single nucleic acid molecule, and wherein the tracr is disposed 3′ to the targeting domain. In an aspect of the gRNA molecule, including in any of the previous aspects involving a sgRNA, the gRNA molecule further includes a loop, disposed 3′ to the targeting domain and 5′ to the tracr, for example a loop that includes SEQ ID NO: 52.

[0029] In an aspect of the gRNA molecule, including in any of the previous aspects, the gRNA molecule includes, from 5′ to 3′, [targeting domain]-: (a) SEQ ID NO: 71; (b) SEQ ID NO: 72; (c) SEQ ID NO: 73; (d) SEQ ID NO: 74; (e) SEQ ID NO: 75; or (f) any of (a) to (e), above, further including, at 3′ end, 1, 2, 3, 4, 5, 6 or 7 uracil (U) nucleotides.

[0030] In an aspect of the gRNA molecule, including in any of the previous aspects, the targeting domain and the tracr are disposed on a single nucleic acid molecule, and wherein said nucleic acid molecule includes, e.g., consists of, said targeting domain and SEQ ID NO: 71, optionally disposed immediately 3′ to said targeting domain.

[0031] In an aspect of the gRNA molecule, including in any of the previous aspects, the targeting domain and the tracr are disposed on a single nucleic acid molecule, and wherein said nucleic acid molecule includes, e.g., consists of, said targeting domain and SEQ ID NO: 75, optionally disposed immediately 3′ to said targeting domain.

[0032] In an aspect of the gRNA molecule, including in any of the previous aspects, one, or optionally more than one, of the nucleic acid molecules including the gRNA molecule includes: a) a, e.g., three, phosphorothioate modification(s) at 3′ end of said nucleic acid molecule or molecules; b) a, e.g., three, phosphorothioate modification(s) at the 5′ end of said nucleic acid molecule or molecules; c) a, e.g., three, 2′-O-methyl modification(s) at 3′ end of said nucleic acid molecule or molecules; d) a, e.g., three, 2′-O-methyl modification(s) at the 5′ end of said nucleic acid molecule or molecules; e) a 2′ O-methyl modification at each of the 4th-to-terminal, 3rd-to-terminal, and 2nd-to-terminal 3′ residues of said nucleic acid molecule or molecules; or f) any combination thereof.

[0033] In an aspect of the gRNA molecule, including in any of the previous aspects, when a CRISPR system (e.g., an RNP as described herein) including the gRNA molecule is introduced into a cell, an indel is formed at or near the target sequence complementary to the targeting domain of the gRNA molecule, for example, an indel that includes a deletion of greater than 10 nucleotides, e.g., 11, 12, 13, 14, 15, 16, 17, 18, 19, 20, 21, 22, 23, 24, 25, 26, 27, 28, 29, 30, 31, 32, 33, 34, or 35 nucleotides.

[0034] In an aspect of the gRNA molecule, including in any of the previous aspects, when a CRISPR system (e.g., an RNP as described herein) including the gRNA molecule is introduced into a population of cells, an indel is formed at or near the target sequence complementary to the targeting domain of the gRNA molecule in at least about 40%, e.g., at least about 50%, e.g., at least about 60%, e.g., at least about 70%, e.g., at least about 80%, e.g., at least about 90%, e.g., at least about 95%, e.g., at least about 96%, e.g., at least about 97%, e.g., at least about 98%, e.g., at least about 99%, of the cells of the population, for example, as measured by next generation sequencing (NGS). In an aspect of the gRNA molecule, including in any of the previous aspects, the indel that includes a deletion of greater than 10 nucleotides, e.g., 11, 12, 13, 14, 15, 16, 17, 18, 19, 20, 21, 22, 23, 24, 25, 26, 27, 28, 29, 30, 31, 32, 33, 34, or 35 nucleotides is detected in at least about 5%, e.g., at least about 10%, 15%, 20%, 25%, 30% or more of the cells of the population, for example, as measured by next generation sequencing (NGS).

[0035] In an aspect of the gRNA molecule, including in any of the previous aspects, when a CRISPR system (e.g., an RNP as described herein) including the gRNA molecule is introduced into a cell, expression of TET2, e.g., at least one isoform of TET2, is reduced or eliminated in said cell.

[0036] In an aspect of the gRNA molecule, including in any of the previous aspects, when a CRISPR system (e.g., an RNP as described herein) including the gRNA molecule is introduced into a cell, a function, e.g., a catalytic function, of TET2 is reduced or eliminated in said cell.

[0037] In an aspect of the gRNA molecule, including in any of the previous aspects, the function, e.g., the catalytic function, of TET2 is reduced, e.g., by at least about 10%, 20%, 30%, 40% or 50%, but said function, e.g., said catalytic function, is not reduced by more than about 80%, e.g., is not eliminated, in said cell.

[0038] In an aspect of the gRNA molecule, including in any of the previous aspects, when a CRISPR system (e.g., an RNP as described herein) including the gRNA molecule is introduced into a cell, TET2 expression, e.g., expression of at least one TET2 isoform, and/or at least one TET2 function is not altered relative to the level of expression and/or function in the same type of cell but to which said CRISPR system is not introduced (e.g., an unaltered cell of the same type).

[0039] In an aspect of the gRNA molecule, including in any of the previous aspects, when a CRISPR system (e.g., an RNP as described herein) including the gRNA molecule is introduced into a cell, no off-target indels are formed in said cell, e.g., as detectible by next generation sequencing and/or a nucleotide insertional assay. In an aspect of the gRNA molecule, including in any of the previous aspects, when a CRISPR system (e.g., an RNP as described herein) including the gRNA molecule is introduced into a population of cells, an off-target indel is detected in no more than about 5%, e.g., no more than about 1%, e.g., no more than about 0.1%, e.g., no more than about 0.01%, of the cells of the population of cells e.g., as detectible by next generation sequencing and/or a nucleotide insertional assay.

[0040] In some embodiments, when a CRISPR system (e.g., an RNP as described herein) including the gRNA molecule (e.g., described herein) is introduced into a cell, e.g., a T cell, a non-naturally occuring indel at or near the target sequence of a gRNA described herein is formed, e.g., an indel comprising a non-naturally occuring indel as described in Table 22 is formed. In some embodiments, when a CRISPR system (e.g., an RNP as described herein) including the gRNA molecule (e.g., described herein) is introduced into a population of cells, e.g., a population of T cells, at least 10%, at least 20%, at least 30%, at least 40%, at least 50%, at least 60%, at least 70%, at least 80%, or at least 90% of the cells of the population comprise one or more non-naturally occuring indels at or near the target sequence of a gRNA described herein, e.g., comprise one or more non-naturally occuring indels selected from the indels described in Table 22 (e.g., the indels described in Table 2 associated with a gRNA targeting domain sequence).

[0041] In some embodiments, when a CRISPR system (e.g., an RNP as described herein) including a gRNA molecule (e.g., described herein) and a template nucleic acid molecule (e.g., as described herein) is introduced into a cell, e.g., a T cell, a cell comprising heterologous sequence inserted at or near the target sequence of a gRNA is formed. In some embodiments, the heterologous sequence comprises sequence encoding a CAR, e.g., as described herein. In some embodiments, the heterologous sequence comprises sequence encoding a CAR, e.g., as described herein, operably linked to sequence encoding a promoter, e.g., an EF1-alpha promoter, e.g., as described herein. In an aspect the disclosure provides a composition including a first gRNA molecule of any of the preceding gRNA aspects and embodiments. In an aspect, the composition further includes a Cas9 molecule, for example, a Cas9 molecule that includes, e.g., consists of, any one of SEQ ID NO: 90 or SEQ ID NO: 111 to SEQ ID NO: 121 or SEQ ID NO: 123, or for example, an active or inactive S. pyogenes Cas9.

[0042] In an aspect of the composition, including in any of the previous composition aspects, the first gRNA molecule and Cas9 molecule are present in a ribonuclear protein complex (RNP).

[0043] In an aspect of the composition, including in any of the previous composition aspects, the composition further includes a template nucleic acid, for example, a template nucleic acid that is double-stranded or single stranded, or for example, wherein the template nucleic acid is or is included in a vector, for example, a lentivirus vector, and AAV vector, an adenovirus vector, a plasmid, a minicircle or a nanoplasmid. In an aspect of the composition, including in any of the previous composition aspects, the template nucleic acid includes at least one (e.g., at least a 5′ or at least a 3′) homology arm, and wherein said homology arm includes sequence homologous to sequence of a TET2 intron. In an aspect of the composition, including in any of the previous composition aspects, the template nucleic acid includes both a 5′ and a 3′ homology arm, and wherein at least one of the homology arms includes sequence homologous to sequence of a TET2 intron. In an aspect of the composition, including in any of the previous composition aspects, the composition the template nucleic acid includes nucleic acid encoding a chimeric antigen receptor (CAR), for example, a CAR as described herein. In aspects, the CAR is: (a) a CD19 CAR, e.g., as described in herein; or (b) a BCMA CAR, e.g., as described herein. In aspects, the CAR is a CD19 CAR including an antigen binding domain including any one of SEQ ID NO: 160 to SEQ ID NO: 172 or SEQ ID NO: 175. In aspects, the CAR is a CD19 CAR and includes any one of SEQ ID NO: 185 to SEQ ID NO: 197. In other aspects, the CAR is a BCMA CAR including an antigen binding domain including any one of SEQ ID NO: 239 to SEQ ID NO: 412. In aspects, the CAR is a BCMA CAR and includes any one of SEQ ID NO: 849 to SEQ ID NO: 863 or SEQ ID NO: 879 to SEQ ID NO: 899, e.g., includes SEQ ID NO: 859. In an aspect of the composition, including in any of the previous composition aspects, the composition includes a template nucleic acid that includes a promotor, e.g., an EF1-alpha promoter, operably linked to the nucleic acid sequence encoding the CAR.

[0044] In an aspect of the composition, including in any of the previous composition aspects, the composition further includes at least one additional gRNA molecule (e.g., a second gRNA molecule; a second gRNA molecule and a third gRNA molecule; or a second gRNA molecule, a third gRNA molecule, and a fourth gRNA molecule), and wherein each gRNA molecule of the composition is complementary to a different target sequence. In an aspect, the at least one additional gRNA molecule, e.g., a second gRNA molecule, the third gRNA molecule (if present), and the fourth gRNA molecule (if present), are complementary to target sequences within the same TET2 intron. In another aspect, the first gRNA molecule, the second gRNA molecule, the third gRNA molecule (if present), and the fourth gRNA molecule (if present) are complementary to target sequence within different genes, for example, the first gRNA molecule is a gRNA molecule of any of the previous gRNA aspects and embodiments (e.g., as described herein), and the second gRNA molecule includes a targeting domain complementary to a target sequence of an inhibitory molecule (e.g., PDCD1), a component of the T cell receptor (e.g., TRAC or TRBC), B2M, or CIITA.

[0045] In an aspect of the composition, including in any of the previous composition aspects, the composition is formulated in a medium suitable for electroporation, for example, wherein each of said gRNA molecules is in a RNP complex with a Cas9 molecule described herein, and wherein each of said RNP complexes is at a concentration of less than about 10 uM, e.g., less than about 3 uM, e.g., less than about 1 uM, e.g., less than about 0.5 uM, e.g., less than about 0.3 uM, e.g., less than about 0.1 uM.

[0046] In an aspect, the disclosure provides a nucleic acid sequence that encodes a gRNA molecule of any of the preceding gRNA aspects and embodiments or a, e.g., all, components of a composition of any of the preceding composition aspects and embodiments.

[0047] In an aspect, the disclosure provides a vector including a nucleic acid of any of the preceding nucleic acid aspects and embodiments, for example, wherein in the vector is selected from the group consisting of a lentiviral vector, an adenoviral vector, an adeno-associated viral (AAV) vector, a herpes simplex virus (HSV) vector, a plasmid, a minicircle, a nanoplasmid, and an RNA vector.

[0048] In an aspect, the disclosure provides a method of altering e.g., altering the structure, e.g., sequence of, a target sequence of a cell, including contacting said cell with: a) a gRNA molecule, e.g., more than one gRNA molecule, of any of the preceding gRNA aspects and embodiments and a Cas9 molecule; b) a gRNA molecule, e.g., more than one gRNA molecule, of any of the preceding gRNA aspects and embodiments and nucleic acid encoding a Cas9 molecule; c) nucleic acid encoding a gRNA molecule, e.g., more than one gRNA molecule, of any of the preceding gRNA aspects and embodiments and a Cas9 molecule; d) nucleic acid encoding a gRNA molecule, e.g., more than one gRNA molecule, of any of the preceding gRNA aspects and embodiments and nucleic acid encoding a Cas9 molecule; e) any of a) to d), above, and a template nucleic acid, e.g., a template nucleic acid as described in any of the preceding aspects and embodiments, e.g., as described herein; g) the composition of any of the preceding composition aspects and embodiments; or h) the vector of any of the preceding vector aspects and embodiments.

[0049] In an aspect of the method, including in any of the previous method aspects, the gRNA molecule of any of the preceding gRNA aspects and embodiments (or nucleic acid encoding the gRNA molecule of any of the preceding gRNA aspects and embodiments), and the Cas9 molecule or nucleic acid encoding the Cas9 molecule, are formulated in a single composition.

[0050] In an aspect of the method, including in any of the previous method aspects, when the composition includes a template nucleic acid, e.g., a template nucleic acid as described in of any of the preceding aspects and embodiments (e.g., as described herein), the template nucleic acid is formulated in a separate composition from the gRNA molecule of any of the preceding gRNA aspects and embodiments (or nucleic acid encoding the gRNA molecule of any of the preceding gRNA aspects and embodiments) and the Cas9 molecule or nucleic acid encoding the Cas9 molecule. In an aspect the more than one compositions are delivered (to a cell) sequentially.

[0051] In an aspect of the method, including in any of the previous method aspects, the method results in insertion of at least a portion of the template nucleic acid at or near the target sequence of the gRNA molecule of any of the preceding gRNA aspects and embodiments. In an aspect, insertion occurs at only at one allele.

[0052] In an aspect, the disclosure provides a method of engineering a cell to express a chimeric antigen receptor (CAR), including: (a) introducing into said cell a CRISPR system including a gRNA molecule of any of the preceding gRNA aspects and embodiments or a composition of any of the preceding composition aspects and embodiments; and (b) introducing into said cell a template nucleic acid including nucleic acid sequence encoding a CAR; wherein said nucleic acid sequence encoding a CAR is integrated into the genome, e.g., optionally at only a single allele of the genome, at or near the target sequence of said gRNA molecule. In an aspect, the method further includes introducing into said cell one or more CRISPR systems including one or more gRNA molecules complementary to a target sequence of an inhibitory molecule, a component of the T cell receptor, B2M and/or CIITA.

[0053] In an aspect of the method, including in any of the previous method aspects, the cell is an animal cell, for example, a mammalian, primate, or human cell, for example, an immune effector cell (e.g., a population of immune effector cells), for example, a T cell or NK cell, e.g., a T cell, e.g., a CD4+ T cell, a CD8+ T cell, or a combination thereof.

[0054] In an aspect of the method, including in any of the previous method aspects, the CAR is a CAR described herein, for example: (a) a CD19 CAR, e.g., as described in herein; or (b) a BCMA CAR, e.g., as described herein. In aspects, the CAR is: (a) a CD19 CAR, e.g., as described in herein; or (b) a BCMA CAR, e.g., as described herein. In aspects, the CAR is a CD19 CAR including an antigen binding domain including any one of SEQ ID NO: 160 to SEQ ID NO: 172 or SEQ ID NO: 175. In aspects, the CAR is a CD19 CAR and includes any one of SEQ ID NO: 185 to SEQ ID NO: 197. In other aspects, the CAR is a BCMA CAR including an antigen binding domain including any one of SEQ ID NO: 239 to SEQ ID NO: 412. In aspects, the CAR is a BCMA CAR and includes any one of SEQ ID NO: 849 to SEQ ID NO: 863 or SEQ ID NO: 879 to SEQ ID NO: 899, e.g., includes SEQ ID NO: 859.

[0055] In an aspect of the method, including in any of the previous method aspects, the cell is autologous or allogeneic with respect to a patient to be administered said cell.

[0056] In an aspect, the disclosure provides a cell as described herein, for example, a cell altered by the method of any of the herein method aspects and embodiments (e.g., by a method described herein). In aspects, the cell includes a first gRNA molecule of any of the preceding gRNA aspects and embodiments (e.g., as described herein), or a composition of any of the preceding composition aspects and embodiments (e.g., as described herein), a nucleic acid, e.g., as described herein, or a vector of any of the preceding vector aspects and embodiments. In aspects, the cell is an animal cell, e.g., a mammalian, primate, or human cell. In aspects, the cell is an immune effector cell (e.g., a population of immune effector cells), e.g., a T cell or NK cell, e.g., a T cell, e.g., a CD4+ T cell, a CD8+ T cell, or a combination thereof.

[0057] In an aspect of the cell, including in any of the previous cell aspects, the cell has reduced or eliminated expression of an inhibitory molecule, a component of the T cell receptor (e.g., TRAC, TRBC1, TRBC2, CD3E, CD3D, or CD3G), B2M, CIITA, or combinations thereof, e.g., relative to an unmodified cell of the same type.

[0058] In an aspect of the cell, including in any of the previous cell aspects, the cell includes nucleic acid sequence encoding a chimeric antigen receptor (CAR) (e.g., a CAR as described herein) integrated into the genome at a TET2 intron or intron-exon junction, e.g., integrated at only a single allele.

[0059] In an aspect of the cell, including in any of the previous cell aspects, the cell includes reduced or eliminated TET2 expression, e.g., expression of at least one TET2 isoform, and/or reduced or eliminated function of TET2, e.g., at least one function of TET2, e.g., catalytic function of TET2, relative to the level of expression and/or function of an unaltered cell of the same cell type.

[0060] In an aspect of the cell, including in any of the previous cell aspects, the cell is a T cell and exhibits: (a) enhanced proliferative capacity; (b) enhanced cytotoxicity; (c) a less-exhausted phenotype (e.g., reduced expression of an inhibitory molecule, e.g., PD1, TIM3, LAG3, PD-L1, or combinations thereof); or (d) a Tscm phenotype (e.g., is CD45RA+CD62L+CD27+CD95+), relative to an unaltered cell of similar type.

[0061] In an aspect of the cell, including in any of the previous cell aspects, the cell is autologous with respect to a patient to be administered said cell. In other aspects of the cell, including in any of the previous cell aspects, the cell is allogeneic with respect to a patient to be administered said cell.

[0062] In an aspect, the disclosure provides a modified cell, which has reduced or eliminated expression and/or function of TET2, and includes heterologous nucleic acid sequence (e.g., nucleic acid sequence encoding a chimeric antigen receptor, e.g., as described herein) integrated at a site within a TET2 intron, wherein said site within a TET2 intron is selected from: a) chr4: 105146980-105190359; b) chr4: 105190506-105233896; c) chr4: 105237352-105241338; d) chr4: 105241430-105242833; e) chr4: 105242928-105243569; f) chr4: 105243779-105259618; g) chr4: 105259770-105261758; h) chr4: 105261849-105269609; i) chr4: 105269748-105272563; and j) chr4: 105272919-105275047, wherein the coordinates above are according to hg38.

[0063] In an aspect of the cell, including in any of the previous cell aspects, the cell has reduced or eliminated expression and/or function of a component of the T cell receptor, B2M, CIITA or a combination thereof, relative to an unmodified cell of the same type.

[0064] In some embodiments, including in any of the previous cell aspects and embodiments, the cell, e.g., the T cell, comprises a non-naturally occurring indel at or near the target sequence of a gRNA described herein, e.g., comprises an indel comprising a non-naturally occurring indel as described in Table 22. In some embodiments, including in any of the previous cell aspects and embodiments, the disclosure provides a population of cells, e.g., a population of T cells, wherein at least 10%, at least 20%, at least 30%, at least 40%, at least 50%, at least 60%, at least 70%, at least 80%, or at least 90% of the cells of the population comprise one or more non-naturally occurring indels at or near the target sequence of a gRNA described herein, e.g., comprise one or more non-naturally occurring indels selected from the indels described in Table 22 (e.g., the indels described in Table 2 associated with a gRNA targeting domain sequence).

[0065] In some embodiments, the disclosure provides a cell comprising heterologous sequence inserted at or near the target sequence of a gRNA, e.g., a gRNA described herein. In some embodiments, the heterologous sequence comprises sequence encoding a CAR, e.g., as described herein. In some embodiments, the heterologous sequence comprises sequence encoding a CAR, e.g., as described herein, operably linked to sequence encoding a promoter, e.g., an EF1-alpha promoter, e.g., as described herein. In preferred embodiments, the CAR in expressed in said cell.

[0066] In an aspect, the disclosure provides a method of providing an anti-tumor immunity in a subject, the method including administering to the subject an effective amount of a cell of any of the preceding cell aspects and embodiments (e.g., as described herein).

[0067] In an aspect, the disclosure provides a method of treating a subject having a disease associated with expression of a tumor antigen, e.g., a proliferative disease, a precancerous condition, a cancer, and a non-cancer related indication associated with expression of the tumor antigen, the method including administering to the subject an effective amount of a cell of any of the preceding cell aspects and embodiments (e.g., as described herein), for example, wherein the disease associated with expression of a tumor antigen is cancer or a non-cancer related indication, for example, wherein the disease is cancer, for example, a cancer selected from colon cancer, rectal cancer, renal-cell carcinoma, liver cancer, non-small cell carcinoma of the lung, cancer of the small intestine, cancer of the esophagus, melanoma, bone cancer, pancreatic cancer, skin cancer, cancer of the head or neck, cutaneous or intraocular malignant melanoma, uterine cancer, ovarian cancer, rectal cancer, cancer of the anal region, stomach cancer, testicular cancer, carcinoma of the fallopian tubes, carcinoma of the endometrium, carcinoma of the cervix, carcinoma of the vagina, carcinoma of the vulva, Hodgkin's Disease, non-Hodgkin's lymphoma, cancer of the endocrine system, cancer of the thyroid gland, cancer of the parathyroid gland, cancer of the adrenal gland, sarcoma of soft tissue, cancer of the urethra, cancer of the penis, solid tumors of childhood, cancer of the bladder, cancer of the kidney or ureter, carcinoma of the renal pelvis, neoplasm of the central nervous system (CNS), primary CNS lymphoma, tumor angiogenesis, spinal axis tumor, brain stem glioma, pituitary adenoma, Kaposi's sarcoma, epidermoid cancer, squamous cell cancer, T-cell lymphoma, environmentally induced cancers, chronic lymphocytic leukemia (CLL), acute leukemias, acute lymphoid leukemia (ALL), B-cell acute lymphoid leukemia (B-ALL), T-cell acute lymphoid leukemia (T-ALL), chronic myelogenous leukemia (CML), acute myeloid leukemia (AML), B cell prolymphocytic leukemia, blastic plasmacytoid dendritic cell neoplasm, Burkitt's lymphoma, diffuse large B cell lymphoma, follicular lymphoma, hairy cell leukemia, small cell- or a large cell-follicular lymphoma, malignant lymphoproliferative conditions, MALT lymphoma, mantle cell lymphoma, marginal zone lymphoma, multiple myeloma, myelodysplasia and myelodysplastic syndrome, Hodgkin's lymphoma, plasmablastic lymphoma, plasmacytoid dendritic cell neoplasm, Waldenstrom macroglobulinemia, and pre-leukemia, combinations of said cancers, and metastatic lesions of said cancers.

[0068] In an aspect of the method, including in any of the previous method aspects, the method further includes administering a chemotherapeutic agent, for example, cyclophosphamide, fludarabine, or cyclophosphamide and fludarabine.

[0069] In an aspect of the method, including in any of the previous method aspects, the method includes administering a lympho-depleting agent or immunosuppressant prior to administering to the subject an effective amount of the cell of any of the preceding cell aspects and embodiments (e.g., as described herein).

[0070] In an aspect, the disclosure provides a population of cells including the cell of any of the previous cell aspects and embodiments (e.g., as described herein), wherein at least about 30% of the cells, e.g., at least about 40%, 50%, 60%, 70%, 80% or 90% of the cells, are a cell of any of the preceding cell aspects and embodiments (e.g., as described herein).

[0071] In an aspect, the disclosure provides a gene editing system which binds a sequence of a TET2 intron or intron-exon junction, for example, wherein the sequence of a TET2 intron or intron-exon junction is a sequence within a genomic region selected from: a) chr4: 105146980-105190359; b) chr4: 105190506-105233896; c) chr4: 105237352-105241338; d) chr4: 105241430-105242833; e) chr4: 105242928-105243569; f) chr4: 105243779-105259618; g) chr4: 105259770-105261758; h) chr4: 105261849-105269609; i) chr4: 105269748-105272563; and j) chr4: 105272919-105275047, wherein said genomic region is according to hg38, for example, wherein the genomic region is chr4: 105269748-105272563. In an aspect, the gene editing system is a zinc finger nuclease (ZFN) gene editing system, a TALEN gene editing system, a CRISPR gene editing system, or a meganuclease gene editing system. In an aspect, the gene editing system further includes a template nucleic acid (e.g., as described herein), for example, a template nucleic acid including nucleic acid sequence encoding a CAR (e.g., as described herein). In an aspect of the gene editing system, including in any of the previous gene editing system aspects, when said gene editing system (and/or nucleic acid sequence encoding one or more components of the gene editing system) is introduced into a cell, the nucleic acid sequence encoding the CAR is integrated into the genome of said cell at or near the sequence of a TET2 intron or intron-exon junction bound by said genome editing system.

[0072] In an aspect, the disclosure provides a cell, modified by the gene editing system of any of the preceding gene editing system aspects and embodiments (e.g., as described herein).

[0073] In an aspect, the disclosure provides a cell including the gene editing system of any of the preceding gene editing system aspects and embodiments (e.g., as described herein).

[0074] In an aspect, the disclosure provides a gRNA molecule of any of the preceding gRNA aspects and embodiments (e.g., as described herein), a composition of any of the preceding composition aspects and embodiments (e.g., as described herein), a nucleic acid of any of the preceding nucleic acid aspects and embodiments (e.g., as described herein), a vector of any of the preceding vector aspects and embodiments (e.g., as described herein), a cell (or population of cells) of any of the preceding cell aspects and embodiments (e.g., as described herein), or a gene editing system of any of the preceding gene editing system aspects and embodiments (e.g., as described herein), for use as a medicament.

[0075] In an aspect, the disclosure provides a gRNA molecule of any of the preceding gRNA aspects and embodiments (e.g., as described herein), a composition of any of the preceding composition aspects and embodiments (e.g., as described herein), a nucleic acid of any of the preceding nucleic acid aspects and embodiments (e.g., as described herein), a vector of any of the preceding vector aspects and embodiments (e.g., as described herein), a cell (or population of cells) of any of the preceding cell aspects and embodiments (e.g., as described herein), or a gene editing system of any of the preceding gene editing system aspects and embodiments (e.g., as described herein), for use in the manufacture of a medicament.

[0076] In an aspect, the disclosure provides a gRNA molecule of any of the preceding gRNA aspects and embodiments (e.g., as described herein), a composition of any of the preceding composition aspects and embodiments (e.g., as described herein), a nucleic acid of any of the preceding nucleic acid aspects and embodiments (e.g., as described herein), a vector of any of the preceding vector aspects and embodiments (e.g., as described herein), a cell (or population of cells) of any of the preceding cell aspects and embodiments (e.g., as described herein), or a gene editing system of any of the preceding gene editing system aspects and embodiments (e.g., as described herein), for use in the treatment of a disease.

[0077] In an aspect, the disclosure provides a gRNA molecule of any of the preceding gRNA aspects and embodiments (e.g., as described herein), a composition of any of the preceding composition aspects and embodiments (e.g., as described herein), a nucleic acid of any of the preceding nucleic acid aspects and embodiments (e.g., as described herein), a vector of any of the preceding vector aspects and embodiments (e.g., as described herein), a cell (or population of cells) of any of the preceding cell aspects and embodiments (e.g., as described herein), or a gene editing system of any of the preceding gene editing system aspects and embodiments (e.g., as described herein), for use in the treatment of a disease, wherein the disease is a disease associated with expression of a tumor antigen, e.g., a proliferative disease, a precancerous condition, a cancer, and a non-cancer related indication associated with expression of the tumor antigen.

[0078] In an aspect, the disclosure provides a gRNA molecule of any of the preceding gRNA aspects and embodiments (e.g., as described herein), a composition of any of the preceding composition aspects and embodiments (e.g., as described herein), a nucleic acid of any of the preceding nucleic acid aspects and embodiments (e.g., as described herein), a vector of any of the preceding vector aspects and embodiments (e.g., as described herein), a cell (or population of cells) of any of the preceding cell aspects and embodiments (e.g., as described herein), or a gene editing system of any of the preceding gene editing system aspects and embodiments (e.g., as described herein), for use in the treatment of a cancer, wherein the cancer is a hematologic cancer selected from the group consisting of chronic lymphocytic leukemia (CLL), acute leukemias, acute lymphoid leukemia (ALL), B-cell acute lymphoid leukemia (B-ALL), T-cell acute lymphoid leukemia (T-ALL), chronic myelogenous leukemia (CML), acute myeloid leukemia (AML), B cell prolymphocytic leukemia, blastic plasmacytoid dendritic cell neoplasm, Burkitt's lymphoma, diffuse large B cell lymphoma, follicular lymphoma, hairy cell leukemia, small cell- or a large cell-follicular lymphoma, malignant lymphoproliferative conditions, MALT lymphoma, mantle cell lymphoma, marginal zone lymphoma, multiple myeloma, myelodysplasia and myelodysplastic syndrome, non-Hodgkin's lymphoma, Hodgkin's lymphoma, plasmablastic lymphoma, plasmacytoid dendritic cell neoplasm, Waldenstrom macroglobulinemia, and pre-leukemia.

[0079] In an aspect, the disclosure provides a gRNA molecule of any of the preceding gRNA aspects and embodiments (e.g., as described herein), a composition of any of the preceding composition aspects and embodiments (e.g., as described herein), a nucleic acid of any of the preceding nucleic acid aspects and embodiments (e.g., as described herein), a vector of any of the preceding vector aspects and embodiments (e.g., as described herein), a cell (or population of cells) of any of the preceding cell aspects and embodiments (e.g., as described herein), or a gene editing system of any of the preceding gene editing system aspects and embodiments (e.g., as described herein), for use in the treatment of a cancer, e.g., wherein the cancer is selected from the group consisting of mesothelioma, adenocarcinoma, glioblastoma, colon cancer, rectal cancer, renal-cell carcinoma, liver cancer, non-small cell carcinoma of the lung, cancer of the small intestine, cancer of the esophagus, melanoma, bone cancer, pancreatic cancer, skin cancer, cancer of the head or neck, cutaneous or intraocular malignant melanoma, uterine cancer, ovarian cancer, rectal cancer, cancer of the anal region, stomach cancer, testicular cancer, carcinoma of the fallopian tubes, carcinoma of the endometrium, carcinoma of the cervix, carcinoma of the vagina, carcinoma of the vulva, Hodgkin's Disease, non-Hodgkin's lymphoma, cancer of the endocrine system, cancer of the thyroid gland, cancer of the parathyroid gland, cancer of the adrenal gland, sarcoma of soft tissue, cancer of the urethra, cancer of the penis, solid tumors of childhood, cancer of the bladder, cancer of the kidney or ureter, carcinoma of the renal pelvis, neoplasm of the central nervous system (CNS), primary CNS lymphoma, tumor angiogenesis, spinal axis tumor, brain stem glioma, pituitary adenoma, Kaposi's sarcoma, epidermoid cancer, squamous cell cancer, T-cell lymphoma, environmentally induced cancers, combinations of said cancers, and metastatic lesions of said cancers.

### BRIEF DESCRIPTION OF THE DRAWINGS

[0080] FIG. 1: Editing efficiency at targeted B2M locus in CD34+ hematopoietic stem cells by different Cas9 variants, as evaluated by NGS and Flow cytometry. NLS=SV40 NLS; His6 (SEQ ID NO: 108) or His8 (SEQ ID NO: 109) refers to 6 or 8 histidine residues, respectively; TEV=tobacco etch virus cleavage site; Cas9=wild type S. pyogenes Cas9—mutations or variants are as indicated).

[0081] FIG. 2: Editing efficiency at targeted B2M locus in primary human T cells by different Cas9 variants and a range of concentrations, as measured by flow cytometry.

[0082] FIG. 3: Editing efficiency of two different Cas9 variants, at various concentrations, in primary human T cells using two different gRNAs targeting either B2M (left panel) or TRAC (right panel). Editing efficiency (% editing) was measured by flow cytometry by measuring the loss of cell surface expression of B2M (left panel) or TCR (right panel).

[0083] FIG. 4: Schematic for gRNA design targeting intron 9-10 (the intron between exon 9 and exon 10) of hTET2.

[0084] FIG. 5: Schematic for AAV targeting construct (not drawn to scale).

[0085] FIG. 6: FACS staining shows that 11.4% of CD3+ cells were BCMA10_CAR+ using g1-RNA and 13.5% using g45-RNA at day 7. The percentage of BCMA10_CAR+ cells increased over time.

[0086] FIG. 7: FACS staining shows CD3+ cells that were BCMA10_CAR+ using g45 and a different donor than used in FIG. 6. The percentage of BCMA10_CAR+ cells increased over time.

[0087] FIG. 8: The total cell fold change is shown for RNP-AAV treated, RNP treated, and debeaded only groups. The expansion of BCMA-CAR+ cells from day 7 to day 10 was slightly faster than the total population (4.3 vs 2.7 fold)

[0088] FIG. 9: Schematic of PCR primers designed to amplify from outside of the homology region to the BCMA10_CAR insert in order to confirm correct integration at both 5′ and 3′ sites (SEQ ID NOS 10557-10558, 10557-10558, 10559-10560, and 10559-10560, respectively, in order of appearance).

[0089] FIG. 10A and FIG. 10B: Exemplary guides were evaluated in CD3+ T cells. For each target site, two sets of primers were designed to amplify each locus. The total percent editing, the percent of insertion and the deletion at each target sequence was determined using NGS.

[0090] FIG. 11: An oligo insertion-based assay (see, e.g., Tsai et al., Nature Biotechnology. 33, 187-197; 2015) was used to determine potential off-target genomic sites cleaved by Cas9 targeting TET2. Exemplary gRNAs targeting TET2 and control guides were screened in Cas9-expressing HEK293 cells. High-efficiency editing at the expected target sequences, potential off-targets for some of the guides, and no off-targets for three of the guides were detected.

### DEFINITIONS

[0091] The terms “gene editing system” or “genome editing system” refer to a system of one or more molecules comprising at least a nuclease (or nuclease domain) and a programmable nucleotide binding domain, which necessary and sufficient to direct and effect modification (e.g., single or double-strand break) of nucleic acid at a target sequence by the nuclease (or nuclease domain). In embodiments, the gene editing system is a CRISPR system. In embodiments, the gene editing system is a zinc finger nuclease system (ZFN). In embodiments, the gene editing system is a TALEN system. In embodiments, the gene editing system is a meganuclease system. In embodiments, the gene editing system modifies a site within a TET2 intron. In embodiments, the gene editing system further comprises a template nucleic acid, e.g., a template nucleic acid comprising sequence encoding a chimeric antigen receptor, e.g., as described herein. In embodiments, one or more of the components of the gene editing system may be introduced into cells as nucleic acid encoding said component or components. Without being bound by theory, upon expression of said component or component, the gene editing system is constituted, e.g., in the cell.

[0092] The terms “CRISPR system,” “Cas system” or “CRISPR/Cas system” refer to a set of molecules comprising an RNA-guided nuclease or other effector molecule and a guide RNA molecule that together are necessary and sufficient to direct and effect modification of nucleic acid at a target sequence by the RNA-guided nuclease or other effector molecule. In one embodiment, a CRISPR system comprises a guide RNA and a Cas protein, e.g., a Cas9 protein. Such systems comprising a Cas9 or modified Cas9 molecule are referred to herein as “Cas9 systems” or “CRISPR/Cas9 systems.” In one example, the guide RNA molecule and Cas molecule may be complexed, to form a ribonuclear protein (RNP) complex.

[0093] The terms “guide RNA,” “guide RNA molecule,” “gRNA molecule” or “gRNA” are used interchangeably, and refer to a set of nucleic acid molecules that promote the specific directing of a RNA-guided nuclease or other effector molecule (typically in complex with the gRNA molecule) to a target sequence. In some embodiments, said directing is accomplished through hybridization of a portion of the gRNA to DNA (e.g., through the gRNA targeting domain), and by binding of a portion of the gRNA molecule to the RNA-guided nuclease or other effector molecule (e.g., through at least the gRNA tracr). In embodiments, a gRNA molecule consists of a single contiguous polynucleotide molecule, referred to herein as a “single guide RNA,” “sgRNA,” or “single-molecule DNA-targeting RNA” and the like. In other embodiments, a gRNA molecule consists of a plurality, usually two, polynucleotide molecules, which are themselves capable of association, usually through hybridization, referred to herein as a “dual guide RNA,” “dgRNA,” or “double-molecule DNA-targeting RNA” and the like. gRNA molecules are described in more detail below, but generally include a targeting domain and a tracr. In embodiments the targeting domain and tracr are disposed on a single polynucleotide. In other embodiments, the targeting domain and tracr are disposed on separate polynucleotides.

[0094] The term “targeting domain” as used herein in connection with a gRNA, is the portion of the gRNA molecule that recognizes, e.g., is complementary to, a target sequence, e.g., a target sequence within the nucleic acid of a cell, e.g., within a gene.

[0095] The term “crRNA” as used herein in connection with a gRNA molecule, is a portion of the gRNA molecule that comprises a targeting domain and a region that interacts with a tracr to form a flagpole region.

[0096] The term “target sequence” refers to a sequence of nucleic acids complementary, for example fully complementary, to a gRNA targeting domain. In embodiments, the target sequence is disposed on genomic DNA. In an embodiment the target sequence is adjacent to (either on the same strand or on the complementary strand of DNA) a protospacer adjacent motif (PAM) sequence recognized by a protein having nuclease or other effector activity, e.g., a PAM sequence recognized by Cas9. The PAM sequence and length may depend on the Cas9 protein used. Non-limiting examples of PAM sequences include 5′-NGG-3′, 5′-NGGNG-3′, 5′-NG-3′, 5′-NAAAAN-3′, 5′-NNAAAAW-3′, 5′-NNNNACA-3′, 5′-GNNNCNNA-3′, and 5′-NNNNGATT-3′ where N represents any nucleotide, and W represents A or T.

[0097] In embodiments, the target sequence is a target sequence of an allogeneic T cell target. In embodiments, the target sequence is a target sequence of an inhibitory molecule. In embodiments, the target sequence is a target sequence of a downstream effector of an inhibitory molecule.

[0098] The term “flagpole” as used herein in connection with a gRNA molecule, refers to the portion of the gRNA where the crRNA and the tracr bind to, or hybridize to, one another.

[0099] The term “tracr” or “tracrRNA” as used herein in connection with a gRNA molecule refers to the portion of the gRNA that binds to a nuclease or other effector molecule. In embodiments, the tracr comprises nucleic acid sequence that binds specifically to Cas9. In embodiments, the tracr comprises nucleic acid sequence that forms part of the flagpole.

[0100] The term “Cas” refers to an RNA-guided nuclease of the CRISPR system that together with a guide RNA molecule are necessary and sufficient to direct and effect modification of nucleic acid at a target sequence. One non-limiting example is a Cas molecule from the Type II CRISPR system, e.g., a Cas9 molecule. Another non-limiting example is a Cas molecule is from a Type V CRISPR system, e.g., a Cpf1 molecule.

[0101] The terms “Cas9” and “Cas9 molecule” refer to an enzyme from bacterial Type II CRISPR/Cas system responsible for DNA cleavage. In embodiments, Cas9 also includes wild-type protein, mutant protein, variant protein, including non-catalytic protein, and functional fragments thereof. Non-limiting examples of Cas9 sequences are known in the art and provided herein. In some embodiments, Cas9 refers to a Cas9 sequence that comprises at least about 60%, 65%, 70%, 75%, 80%, 85%, 90%, 95%, 96%, 97%, 98%, or 99% homology with; differs at no more than 1%, 2%, 5%, 10%, 15%, 20%, 30%, or 40% of the amino acid residues when compared with; differs by at least 1, 2, 5, 10 or 20 amino acids but by no more than 100, 80, 70, 60, 50, 40 or 30 amino acids from; or is identical to any Cas9 sequence, e.g., wild-type, mutant, variant, non-catalytic, or functional fragment thereof, known in the art or disclosed herein.

[0102] The terms “Cpf1” and “Cpf1 molecule” refer to an enzyme from a bacterial Type V CRISPR/Cas system responsible for DNA cleavage. In embodiments, Cpf1 also includes wild-type protein, mutant protein, variant protein, including non-catalytic protein, and functional fragments thereof. Non-limiting examples of Cpf1 sequences are known in the art. In some embodiments, Cpf1 refers to a Cpf1 sequence that comprises at least about 60%, 65%, 70%, 75%, 80%, 85%, 90%, 95%, 96%, 97%, 98%, or 99% homology with; differs at no more than 1%, 2%, 5%, 10%, 15%, 20%, 30%, or 40% of the amino acid residues when compared with; differs by at least 1, 2, 5, 10 or 20 amino acids but by no more than 100, 80, 70, 60, 50, 40 or 30 amino acids from; or is identical to any Cpf1 sequence, e.g., wild-type, mutant, variant, non-catalytic, or functional fragment thereof, known in the art.

[0103] The term “complementary” as used in connection with nucleic acid, refers to the pairing of bases, A with T or U, and G with C. The term complementary can also refer to nucleic acid molecules that are completely complementary, that is, form A to T or U pairs and G to C pairs across the entire reference sequence, as well as molecules that are at least about 80%, 85%, 90%, 95%, or 99% complementary.

[0104] As used herein, “template nucleic acid” refers to a nucleic acid sequence which can be used with a gene editing system, e.g., a CRISPR system, to insert nucleic acid sequence at or near a target sequence e.g., in homology-directed repair or homologous recombination. In embodiments, part of the template nucleic acid sequence is inserted at or near a target sequence. In embodiments, all or substantially all of the template nucleic acid sequence is inserted at or near a target sequence. The template nucleic acid can be single- or double-stranded RNA or DNA. In embodiments, the template nucleic acid is a vector, or is included in a vector, for example an AAV vector, plasmid DNA, minicircle or nanoplasmid. In aspects, the template nucleic acid comprises nucleic acid sequence encoding a chimeric antigen receptor (CAR), e.g., as described herein. In aspects, the template nucleic acid comprises or is included in a vector comprising nucleic acid sequence encoding a chimeric antigen receptor (CAR), e.g., as described herein. In embodiments, the template nucleic acid comprises nucleic acid sequence which is complementary to nucleic acid sequence at or near the target sequence.

[0105] An “indel,” as the term is used herein, refers to a nucleic acid comprising one or more insertions of nucleotides, one or more deletions of nucleotides, or a combination of insertions and deletions of nucleotides, relative to an unmodified reference nucleic acid, that results from being exposed to a composition comprising a gRNA molecule, e.g., a CRISPR system. In some embodiments, an indel comprises nucleotides outside of the target sequence. Indels can be determined by sequencing nucleic acid after being exposed to a composition comprising a gRNA molecule, for example, by NGS. With respect to the site of an indel, an indel is said to be “at or near” a reference site (e.g., a site complementary to a targeting domain of a gRNA molecule) if it comprises at least one insertion or deletion within about 10, 9, 8, 7, 6, 5, 4, 3, 2, or 1 nucleotide(s) of the reference site, or is overlapping with part or all of said reference site (e.g., comprises at least one insertion or deletion overlapping with, or within 10, 9, 8, 7, 6, 5, 4, 3, 2, or 1 nucleotides of a site complementary to the targeting domain of a gRNA molecule, e.g., a gRNA molecule described herein). In embodiments, indels are non-naturally occurring, for example, do not correspond to any naturally-occurring genetic mutation (e.g., insertion, deletion or combination thereof), for example, in the target cell.

[0106] An “indel pattern,” as the term is used herein, refers to a set of indels that results after exposure to a composition comprising a gene editing system, e.g., a CRISPR system, or gRNA molecule. In an embodiment, the indel pattern comprises or consists of, the top three indels, by frequency of appearance. In an embodiment, the indel pattern comprises or consists of, the top five indels, by frequency of appearance. In an embodiment, the indel pattern comprises or consists of, the indels which are present at greater than about 5% frequency relative to all sequencing reads. In an embodiment, the indel pattern comprises or consists of, the indels which are present at greater than about 10% frequency relative to total number of indel sequencing reads (i.e., those reads that do not consist of the unmodified reference nucleic acid sequence). In an embodiment, the indel pattern includes of any 3 of the top five most frequently observed indels. The indel pattern may be determined, for example, by sequencing cells of a population of cells which were exposed to a gene editing system, e.g., a CRISPR system, e.g., a CRISPR system comprising a gRNA molecule described herein.

[0107] An “off-target indel,” as the term I used herein, refers to an indel at or near a site other than the target sequence of the targeting domain of the gRNA molecule. Such sites may comprise, for example, 1, 2, 3, 4, 5 or more mismatch nucleotides relative to the sequence complementary to the targeting domain of the gRNA. In exemplary embodiments, such sites are detected using targeted sequencing of in silico predicted off-target sites, or by an insertional method known in the art.

[0108] The term “inhibitory molecule” refers to a molecule, which when activated causes or contributes to an inhibition of cell survival, activation, proliferation and/or function. The term also refers to the gene encoding said molecule and its associated regulatory elements, e.g., promoters, enhancers, etc. In embodiments, an inhibitory molecule is a molecule expressed on an immune effector cell, e.g., on a T cell. Non-limiting examples of inhibitory molecules are PD-1, PD-L1, PD-L2, CTLA4, TIM3, LAG3, CEACAM (e.g., CEACAM-1, CEACAM-3 and/or CEACAM-5), VISTA, BTLA, TIGIT, LAIR1, CD160, 2B4, CD80, CD86, B7-H3 (CD276), B7-H4 (VTCN1), HVEM (TNFRSF14 or CD107), KIR, A2aR, MHC class I, MHC class II, GAL9, adenosine, and TGF beta. It will be understood that the term inhibitory molecule may refer to the gene (and its associated regulatory elements) encoding an inhibitory molecule protein when it is used in connection with a target sequence or gRNA molecule. In some embodiments, gene editing systems, e.g., CRISPR systems, comprising one or more gRNA molecules comprising a targeting domain to a sequence of an inhibitory molecule are used in conjunction with the other features disclosed herein (e.g., a CRISPR system to a TET2 intron).

[0109] The terms “allogeneic T cell target” and “allogeneic T-cell target” are used interchangeably herein, and refer to a protein that mediates or contributes to a host versus graft response, mediates or contributes to a graft versus host response, or is a target for an immunosuppressant; and the gene encoding said molecule and its associated regulatory elements, e.g., promoters. It will be understood that the term allogeneic T cell target may refer to the gene (and its associated regulatory elements) encoding an allogeneic T cell target protein when it is used in connection with a target sequence or gRNA molecule. Without being bound by theory, inhibition or elimination of one or more allogeneic T cell targets, e.g., by use of gene editing systems, e.g., CRISPR systems, to such targets, may improve the efficacy, survival, function and/or viability of, e.g., an allogeneic cell, e.g., an allogeneic T cell, for example, by reducing or eliminating undesirable immunogenicity (such as a host versus graft response or a graft versus host response). An allogeneic T cell target may also refer to a functional fragment, splice variant, or domain of a specified target.

[0110] In some embodiments, immunogenicity refers to the initiation of a humoral or cell-mediated immune response. In certain embodiments, undesirable immunogenicity may result from graft versus host disease (GvHD) or graft versus host response, e.g., following an allogeneic transplant, in which the donor/grafted cells or tissues attack the donee/host cells or tissues as foreign. In other embodiments, undesirable immunogenicity may result from host versus graft disease (HvGD), e.g., following an allogeneic transplant, in which the donee/host cells or tissues attack the donor/grafted cells or tissues as foreign.

[0111] In a non-limiting example, the protein that mediates or contributes to a graft versus host response or host versus graft response is one or more components of the T cell receptor. In an embodiment, the component of the T cell receptor is the T cell receptor alpha, for example the constant domain of the TCR alpha. In an embodiment, the component of the T cell receptor is the T cell receptor beta chain, for example the constant domain 1 or constant domain 2 of the TCR beta. In an embodiment, the component of the T cell receptor is the T cell receptor delta chain. In an embodiment, the component of the T cell receptor is the T cell receptor epsilon chain. In an embodiment, the component of the T cell receptor is the T cell receptor zeta chain. In an embodiment, the component of the T cell receptor is the T cell receptor gamma chain. Thus, in embodiments where the protein encoded by the allogeneic T cell target is a component of the TCR, the gene encoding the allogeneic T cell target may be, for example, TRAC, TRBC1, TRBC2, CD3D, CD3E, CD3G or CD247, and combinations thereof.

[0112] In a non-limiting example, the protein that mediates or contributes to a graft versus host response or host versus graft response is an HLA protein or B2M. Examples of HLA proteins include HLA-A, HLA-B and HLA-C. Thus, in embodiments where the allogeneic T cell target protein is a HLA or B2M protein, the gene encoding the allogeneic T cell target may be, for example, HLA-A, HLA-B, HLA-C or B2M, and combinations thereof. In other embodiments, the allogeneic T cell target protein is NLRC5, and the gene encoding the allogeneic T cell target may be, for example, NLRC5.

[0113] In some embodiments, the protein that mediates or contributes to a graft versus host response or a host versus graft response is selected from: HLA-DM, HLA-DO, HLA-DR, HLA-DQ, HLA-DP, CIITA, RFXANK, RFXAP, RFX1, RFX5, NF-YA, NF—YB, NF—YC, X2BP, OCAB, HLA-A, HLA-B, HLA-C, B2M, NLRC5, TRAC, TRBC1, TRBC2, CD247, CD3, CD3D, CD3E, CD3G, DCK, CD52, FKBP1A, and NR3C1. In a non-limiting example, the protein that mediates or contributes to a graft versus host response or host versus graft response is a major histocompatibility complex class II (MHC II) molecule (e.g., HLA-Dx (where x refers to a letter of a MHC II protein, e.g., HLA-DM, HLA-DO, HLA-DR, HLA-DQ and/or HLA-DP)), or a regulatory factor for expression of a MHC II, and combinations thereof. A non-limiting example is CIITA (also referred to herein as C2TA). Thus, in embodiments where the allogeneic T cell target protein is a CIITA, the gene encoding the allogeneic T cell target may be, for example, CIITA. In another non-limiting example, the protein that mediates or contributes to a graft versus host response or host versus graft response is RFXANK. In another non-limiting example, the protein that mediates or contributes to a graft versus host response or host versus graft response is RFXAP. In another non-limiting example, the protein that mediates or contributes to a graft versus host response or host versus graft response is RFX5. In another non-limiting example, the protein that mediates or contributes to a graft versus host response or host versus graft response is RFX1.

[0114] In some embodiments, gene editing systems, e.g., CRISPR systems, comprising one or more gRNA molecules comprising a targeting domain to a sequence of an allogenic T cell target are used alone or in conjunction with the other features disclosed herein (e.g., a CRISPR system to a TET2 intron). In embodiments, CRISPR systems targeting TRAC, B2M and/or CIITA are used in conjunction with the other features disclosed herein (e.g., a CRISPR system to a TET2 intron).

[0115] The term “target for an immunosuppressant” as used herein refers to a molecular target, for example a receptor or other protein, for an immunosuppressant agent (the terms, “immunosuppressant” and “immunosuppressive” are used interchangeably herein in connection with an agent, or target for an agent). An immunosuppressant agent is an agent that suppresses immune function by one or more mechanisms of action. In other words, an immunosuppressive agent is a role played by a compound which is exhibited by a capability to diminish the extent and/or voracity of an immune response. One example of a type of activity exhibited by an immunosuppressant agent is eliminating T-cells, for example, activated T-cells. Another example of a type of activity exhibited by an immunosuppressant agent is reducing the activity or activation level of T-cells.

[0116] As a non-limiting example, an immunosuppressive agent can be a calcineurin inhibitor, a target of rapamycin, an interleukin-2 a-chain blocker, an inhibitor of inosine monophosphate dehydrogenase, an inhibitor of dihydrofolic acid reductase, a corticosteroid, cyclosporine, or an immunosuppressive antimetabolite. Classical cytotoxic immunosuppressants act by inhibiting DNA synthesis. Others may act through activation of T-cells or by inhibiting the activation of helper cells. As non-limiting examples, targets for immunosuppressive agent can be a receptor for an immunosuppressive agent such as: deoxycytidine kinase, CD52, glucocorticoid receptor (GR), a FKBP family gene member, e.g., FKBP12, and a cyclophilin family gene member. In an embodiment, the target for an immunosuppressant is deoxycytidine kinase (DCK), and the immunosuppressant is a nucleoside analog-based drug such as cytarabine (cytosine arabinoside) or gemcitabine. In an embodiment, the target for an immunosuppressant is GR, and the immunosuppressant is a corticosteroid such as dexamethasone. In an embodiment, the target for an immunosuppressant is CD52, and the immunosuppressant is an anti-CD52 antibody or antigen-binding fragment thereof such as alemtuzumab (CAMPATH®). In an embodiment, the target for an immunosuppressant is FKBP12, and the immunosuppressant is FK506 (or analog or FKBP12-binding fragment thereof), cyclosporine, rapamycin or rapalog, or mTor inhibitor such as RAD001. Thus, in embodiments where the allogeneic T cell target is a target for an immunosuppressant protein, the gene encoding the allogeneic T cell target may be, for example, NR3C1, FKBPIA, CD52, or DCK, and combinations thereof. In some embodiments, gene editing systems, e.g., CRISPR systems, comprising one or more gRNA molecules comprising a targeting domain to a sequence of allogenic T cell target are used in conjunction with the other features disclosed herein (e.g., a CRISPR system to a TET2 intron). In embodiments, CRISPR systems targeting TRAC and FKBPIA are used in conjunction with the other features disclosed herein (e.g., a CRISPR system to a TET2 intron).

[0117] “Tet” as the term is used herein, refers to the family of genes, and the proteins encoded by said genes, of the ten-eleven translocation methlcytosine dioxygenase family. Tet includes, for example, Tet1, Tet2 and Tet3.

[0118] “Tet2” as the term is used herein, refers to gene, tet methylcytosine dioxygenase 2, and the protein encoded by said gene, the tet2 methylcytosine dioxygenase, which catalyzes the conversion of methylcytosine to 5-hydroxymethylcytosine. It is sometimes also referred to as “KIAA1546,” “FLJ20032” and “tet oncogene family member 2.” The encoded protein is involved in myelopoiesis, and defects in this gene have been associated with several myeloproliferative disorders. In the human genome, TET2 is located on chromosome 4q24. The Tet2 gene includes both the introns and exons of the associated gene. Currently six TET2 isoforms have been described and their Genebank numbers are: NM_001127208.2; XM_005263082.1; XM 006714242.2; NM_017628.4; XM_011532044.1; and XM_011532043.1.

[0119] An example of the protein sequence of human Tet2 is provided as UniProt accession number Q6N021:

```
[SEQ ID NO: 950]
                10 20 30 40 50
MEQDRINHVE GNRLSPFLIP SPPICQTEPL ATKLQNGSPL PERAHPEVNG
                60 70 80 90 100
DTKWHSFKSY YGIPCMKGSQ NSRVSPDFTQ ESRGYSKCLQ NGGIKRTVSE
              110 120 130 140 150
PSLSGLLQIK KLKQDQKANG ERRNFGVSQE RNPGESSQPN VSDLSDKKES
              160 170 180 190 200
VSSVAQENAV KDFTSFSTHN CSGPENPELQ ILNEQEGKSA NYHDKNIVLL
              210 220 230 240 250
KNKAVLMPNG ATVSASSVEH THGELLEKTL SQYYPDCVSI AVQKTTSHIN
              260 270 280 290 300
AINSQATNEL SCEITHPSHT SGQINSAQTS NSELPPKPAA VVSEACDADD
              310 320 330 340 350
ADNASKLAAM LNTCSFQKPE QLQQQKSVFE ICPSPAENNI QGTTKLASGE
              360 370 380 390 400
EFCSGSSSNL QAPGGSSERY LKQNEMNGAY FKQSSVFTKD SFSATTTPPP
              410 420 430 440 450
PSQLLLSPPP PLPQVPQLPS EGKSTLNGGV LEEHHHYPNQ SNTTLLREVK
              460 470 480 490 500
IEGKPEAPPS QSPNPSTHVC SPSPMLSERP QNNCVNRNDI QTAGTMTVPL
              510 520 530 540 550
CSEKTRPMSE HLKHNPPIFG SSGELQDNCQ QLMRNKEQEI LKGRDKEQTR
              560 570 580 590 600
DLVPPTQHYL KPGWIELKAP RFHQAESHLK RNEASLPSIL QYQPNLSNQM
              610 620 630 640 650
TSKQYTGNSN MPGGLPRQAY TQKTTQLEHK SQMYQVEMNQ GQSQGTVDQH
              660 670 680 690 700
LQFQKPSHQV HFSKTDHLPK AHVQSLCGTR FHFQQRADSQ TEKLMSPVLK
              710 720 730 740 750
QHLNQQASET EPFSNSHLLQ HKPHKQAAQT QPSQSSHLPQ NQQQQQKLQI
              760 770 780 790 800
KNKEEILQTF PHPQSNNDQQ REGSFFGQTK VEECFHGENQ YSKSSEFETH
              810 820 830 840 850
NVQMGLEEVQ NINRRNSPYS QTMKSSACKI QVSCSNNTHL VSENKEQTTH
              860 870 880 890 900
PELFAGNKTQ NLHHMQYFPN NVIPKQDLLH RCFQEQEQKS QQASVLQGYK
              910 920 930 940 950
NRNQDMSGQQ AAQLAQQRYL IHNHANVFPV PDQGGSHTQT PPQKDTQKHA
              960 970 980 990 1000
ALRWHLLQKQ EQQQTQQPQT ESCHSQMHRP IKVEPGCKPH ACMHTAPPEN
            1010 1020 1030 1040 1050
KTWKKVTKQE NPPASCDNVQ QKSIIETMEQ HLKQFHAKSL FDHKALTLKS
            1060 1070 1080 1090 1100
QKQVKVEMSG PVTVLTRQTT AAELDSHTPA LEQQTTSSEK TPTKRTAASV
            1110 1120 1130 1140 1150
LNNFIESPSK LLDTPIKNLL DTPVKTQYDF PSCRCVEQII EKDEGPFYTH
            1160 1170 1180 1190 1200
LGAGPNVAAI REIMEERFGQ KGKAIRIERV IYTGKEGKSS QGCPIAKWVV
            1210 1220 1230 1240 1250
RRSSSEEKLL CLVRERAGHT CEAAVIVILI LVWEGIPLSL ADKLYSELTE
            1260 1270 1280 1290 1300
TLRKYGTLTN RRCALNEERT CACQGLDPET CGASFSFGCS WSMYYNGCKF
            1310 1320 1330 1340 1350
ARSKIPRKFK LLGDDPKEEE KLESHLQNLS TLMAPTYKKL APDAYNNQIE
            1360 1370 1380 1390 1400
YEHRAPECRL GLKEGRPFSG VTACLDFCAH AHRDLHNMQN GSTLVCTLTR
            1410 1420 1430 1440 1450
EDNREFGGKP EDEQLHVLPL YKVSDVDEFG SVEAQEEKKR SGAIQVLSSF
            1460 1470 1480 1490 1500
RRKVRMLAEP VKTCRQRKLE AKKAAAEKLS SLENSSNKNE KEKSAPSRTK
            1510 1520 1530 1540 1550
QTENASQAKQ LAELLRLSGP VMQQSQQPQP LQKQPPQPQQ QQRPQQQQPH
            1560 1570 1580 1590 1600
HPQTESVNSY SASGSTNPYM RRPNPVSPYP NSSHTSDIYG STSPMNFYST
            1610 1620 1630 1640 1650
SSQAAGSYLN SSNPMNPYPG LLNQNTQYPS YQCNGNLSVD NCSPYLGSYS
            1660 1670 1680 1690 1700
PQSQPMDLYR YPSQDPLSKL SLPPIHTLYQ PRFGNSQSFT SKYLGYGNQN
            1710 1720 1730 1740 1750
MQGDGFSSCT IRPNVHHVGK LPPYPTHEMD GHFMGATSRL PPNLSNPNMD
            1760 1770 1780 1790 1800
YKNGEHHSPS HIIHNYSAAP GMFNSSLHAL HLQNKENDML SHTANGLSKM
            1810 1820 1830 1840 1850
LPALNHDRTA CVQGGLHKLS DANGQEKQPL ALVQGVASGA EDNDEVWSDS
            1860 1870 1880 1890 1900
EQSFLDPDIG GVAVAPTHGS ILIECAKREL HATTPLKNPN RNHPTRISLV
            1910 1920 1930 1940 1950
FYQHKSMNEP KHGLALWEAK MAEKAREKEE ECEKYGPDYV PQKSHGKKVK
            1960 1970 1980 1990 2000
REPAEPHETS EPTYLRFIKS LAERTMSVTT DSTVTTSPYA FTRVTGPYNR
  2002
YI
```

[0120] The tet2 gene is located on chromosome 4, location GRCh38.p2 (GCF_000001405.28) (NC_000004.12 (105145875 to 105279803); Gene ID 54790.

[0121] Examples of nucleic acid sequences encoding Tet2 are provided below. There are 6 identified isoforms of human Tet2 have been identified. The mRNA sequences are provided below (In embodiments, in each sequence, T may be replaced with U). In embodiments, Tet2 includes the proteins encoded by each of the sequences below:

| | NCBI | |
|---|---|---|
| | Reference | |
| Name | Sequence | Sequence |
| Homo sapiens | NM_001127208.2 | GGCAGTGGCAGCGGCGAGAGCTTGGGCGGCCGCCGCCG |
| tet | | CCTCCTCGCGAGCGCCGCGCGCCCGGGTCCCG |
| methylcytosine | | CTCGCATGCAAGTCACGTCCGCCCCCTCGGCGCGGCCGC |
| dioxygenase 2 | | CCCGAGACGCCGGCCCCGCTGAGTGATGAGA |
| (TET2), | | ACAGACGTCAAACTGCCTTATGAATATTGATGCGGAGGC |
| transcript | | TAGGCTGCTTTCGTAGAGAAGCAGAAGGAAG |
| variant 1, | | CAAGATGGCTGCCCTTTAGGATTTGTTAGAAAGGAGACC |
| mRNA | | CGACTGCAACTGCTGGATTGCTGCAAGGCTG |
| [SEQ ID NO: | | AGGGACGAGAACGAGGCTGGCAAACATTCAGCAGCACA |
| 951] | | CCCTCTCAAGATTGTTTACTTGCCTTTGCTCC |
| | | TGTTGAGTTACAACGCTTGGAAGCAGGAGATGGGCTCAG |
| | | CAGCAGCCAATAGGACATGATCCAGGAAGAG |
| | | CAGTAAGGGACTGAGCTGCTGAATTCAACTAGAGGGCA |
| | | GCCTTGTGGATGGCCCCGAAGCAAGCCTGATG |
| | | GAACAGGATAGAACCAACCATGTTGAGGGCAACAGACT |
| | | AAGTCCATTCCTGATACCATCACCTCCCATTT |
| | | GCCAGACAGAACCTCTGGCTACAAAGCTCCAGAATGGA |
| | | AGCCCACTGCCTGAGAGAGCTCATCCAGAAGT |
| | | AAATGGAGACACCAAGTGGCACTCTTTCAAAAGTTATTA |
| | | TGGAATACCCTGTATGAAGGGAAGCCAGAAT |
| | | AGTCGTGTGAGTCCTGACTTTACACAAGAAAGTAGAGGG |
| | | TATTCCAAGTGTTTGCAAAATGGAGGAATAA |
| | | AACGCACAGTTAGTGAACCTTCTCTCTCTGGGCTCCTTCA |
| | | GATCAAGAAATTGAAACAAGACCAAAAGGC |
| | | TAATGGAGAAAGACGTAACTTCGGGGTAAGCCAAGAAA |
| | | GAAATCCAGGTGAAAGCAGTCAACCAAATGTC |
| | | TCCGATTTGAGTGATAAGAAAGAATCTGTGAGTTCTGTA |
| | | GCCCAAGAAAATGCAGTTAAAGATTTCACCA |
| | | GTTTTTCAACACATAACTGCAGTGGGCCTGAAAATCCAG |
| | | AGCTTCAGATTCTGAATGAGCAGGAGGGGAA |
| | | AAGTGCTAATTACCATGACAAGAACATTGTATTACTTAA |
| | | AAACAAGGCAGTGCTAATGCCTAATGGTGCT |
| | | ACAGTTTCTGCCTCTTCCGTGGAACACACACATGGTGAA |
| | | CTCCTGGAAAAAACACTGTCTCAATATTATC |
| | | CAGATTGTGTTTCCATTGCGGTGCAGAAAACCACATCTC |
| | | ACATAAATGCCATTAACAGTCAGGCTACTAA |
| | | TGAGTTGTCCTGTGAGATCACTCACCCATCGCATACCTCA |
| | | GGGCAGATCAATTCCGCACAGACCTCTAAC |
| | | TCTGAGCTGCCTCCAAAGCCAGCTGCAGTGGTGAGTGAG |
| | | GCCTGTGATGCTGATGATGCTGATAATGCCA |
| | | GTAAACTAGCTGCAATGCTAAATACCTGTTCCTTTCAGA |
| | | AACCAGAACAACTACAACAACAAAAATCAGT |
| | | TTTTGAGATATGCCCATCTCCTGCAGAAAATAACATCCA |
| | | GGGAACCACAAAGCTAGCGTCTGGTGAAGAA |
| | | TTCTGTTCAGGTTCCAGCAGCAATTTGCAAGCTCCTGGTG |
| | | GCAGCTCTGAACGGTATTTAAAACAAAATG |
| | | AAATGAATGGTGCTTACTTCAAGCAAAGCTCAGTGTTCA |
| | | CTAAGGATTCCTTTTCTGCCACTACCACACC |
| | | ACCACCACCATCACAATTGCTTCTTTCTCCCCCTCCTCCT |
| | | CTTCCACAGGTTCCTCAGCTTCCTTCAGAA |
| | | GGAAAAAGCACTCTGAATGGTGGAGTTTTAGAAGAACA |
| | | CCACCACTACCCCAACCAAAGTAACACAACAC |
| | | TTTTAAGGGAAGTGAAAATAGAGGGTAAACCTGAGGCA |
| | | CCACCTTCCCAGAGTCCTAATCCATCTACACA |
| | | TGTATGCAGCCCTTCTCCGATGCTTTCTGAAAGGCCTCAG |
| | | AATAATTGTGTGAACAGGAATGACATACAG |
| | | ACTGCAGGGACAATGACTGTTCCATTGTGTTCTGAGAAA |
| | | ACAAGACCAATGTCAGAACACCTCAAGCATA |
| | | ACCCACCAATTTTTGGTAGCAGTGGAGAGCTACAGGACA |
| | | ACTGCCAGCAGTTGATGAGAAACAAAGAGCA |
| | | AGAGATTCTGAAGGGTCGAGACAAGGAGCAAACACGAG |
| | | ATCTTGTGCCCCCAACACAGCACTATCTGAAA |
| | | CCAGGATGGATTGAATTGAAGGCCCCTCGTTTTCACCAA |
| | | GCGGAATCCCATCTAAAACGTAATGAGGCAT |
| | | CACTGCCATCAATTCTTCAGTATCAACCCAATCTCTCCAA |
| | | TCAAATGACCTCCAAACAATACACTGGAAA |
| | | TTCCAACATGCCTGGGGGGCTCCCAAGGCAAGCTTACAC |
| | | CCAGAAAACAACACAGCTGGAGCACAAGTCA |
| | | CAAATGTACCAAGTTGAAATGAATCAAGGGCAGTCCCAA |
| | | GGTACAGTGGACCAACATCTCCAGTTCCAAA |
| | | AACCCTCACACCAGGTGCACTTCTCCAAAACAGACCATT |
| | | TACCAAAAGCTCATGTGCAGTCACTGTGTGG |
| | | CACTAGATTTCATTTTCAACAAAGAGCAGATTCCCAAAC |
| | | TGAAAAACTTATGTCCCCAGTGTTGAAACAG |
| | | CACTTGAATCAACAGGCTTCAGAGACTGAGCCATTTTCA |
| | | AACTCACACCTTTTGCAACATAAGCCTCATA |
| | | AACAGGCAGCACAAACACAACCATCCCAGAGTTCACATC |
| | | TCCCTCAAAACCAGCAACAGCAGCAAAAATT |
| | | ACAAATAAAGAATAAAGAGGAAATACTCCAGACTTTTCC |
| | | TCACCCCCAAAGCAACAATGATCAGCAAAGA |
| | | GAAGGATCATTCTTTGGCCAGACTAAAGTGGAAGAATGT |
| | | TTTCATGGTGAAAATCAGTATTCAAAATCAA |
| | | GCGAGTTCGAGACTCATAATGTCCAAATGGGACTGGAGG |
| | | AAGTACAGAATATAAATCGTAGAAATTCCCC |
| | | TTATAGTCAGACCATGAAATCAAGTGCATGCAAAATACA |
| | | GGTTTCTTGTTCAAACAATACACACCTAGTT |
| | | TCAGAGAATAAAGAACAGACTACACATCCTGAACTTTTT |
| | | GCAGGAAACAAGACCCAAAACTTGCATCACA |
| | | TGCAATATTTTCCAAATAATGTGATCCCAAAGCAAGATC |
| | | TTCTTCACAGGTGCTTTCAAGAACAGGAGCA |
| | | GAAGTCACAACAAGCTTCAGTTCTACAGGGATATAAAAA |
| | | TAGAAACCAAGATATGTCTGGTCAACAAGCT |
| | | GCGCAACTTGCTCAGCAAAGGTACTTGATACATAACCAT |
| | | GCAAATGTTTTTCCTGTGCCTGACCAGGGAG |
| | | GAAGTCACACTCAGACCCCTCCCCAGAAGGACACTCAAA |
| | | AGCATGCTGCTCTAAGGTGGCATCTCTTACA |
| | | GAAGCAAGAACAGCAGCAAACACAGCAACCCCAAACTG |
| | | AGTCTTGCCATAGTCAGATGCACAGGCCAATT |
| | | AAGGTGGAACCTGGATGCAAGCCACATGCCTGTATGCAC |
| | | ACAGCACCACCAGAAAACAAAACATGGAAAA |
| | | AGGTAACTAAGCAAGAGAATCCACCTGCAAGCTGTGATA |
| | | ATGTGCAGCAAAAGAGCATCATTGAGACCAT |
| | | GGAGCAGCATCTGAAGCAGTTTCACGCCAAGTCGTTATT |
| | | TGACCATAAGGCTCTTACTCTCAAATCACAG |
| | | AAGCAAGTAAAAGTTGAAATGTCAGGGCCAGTCACAGTT |
| | | TTGACTAGACAAACCACTGCTGCAGAACTTG |
| | | ATAGCCACACCCCAGCTTTAGAGCAGCAAACAACTTCTT |
| | | CAGAAAAGACACCAACCAAAAGAACAGCTGC |
| | | TTCTGTTCTCAATAATTTTATAGAGTCACCTTCCAAATTA |
| | | CTAGATACTCCTATAAAAAATTTATTGGAT |
| | | ACACCTGTCAAGACTCAATATGATTTCCCATCTTGCAGAT |
| | | GTGTAGAGCAAATTATTGAAAAAGATGAAG |
| | | GTCCTTTTTATACCCATCTAGGAGCAGGTCCTAATGTGGC |
| | | AGCTATTAGAGAAATCATGGAAGAAAGGTT |
| | | TGGACAGAAGGGTAAAGCTATTAGGATTGAAAGAGTCA |
| | | TCTATACTGGTAAAGAAGGCAAAAGTTCTCAG |
| | | GGATGTCCTATTGCTAAGTGGGTGGTTCGCAGAAGCAGC |
| | | AGTGAAGAGAAGCTACTGTGTTTGGTGCGGG |
| | | AGCGAGCTGGCCACACCTGTGAGGCTGCAGTGATTGTGA |
| | | TTCTCATCCTGGTGTGGGAAGGAATCCCGCT |
| | | GTCTCTGGCTGACAAACTCTACTCGGAGCTTACCGAGAC |
| | | GCTGAGGAAATACGGCACGCTCACCAATCGC |
| | | CGGTGTGCCTTGAATGAAGAGAGAACTTGCGCCTGTCAG |
| | | GGGCTGGATCCAGAAACCTGTGGTGCCTCCT |
| | | TCTCTTTTGGTTGTTCATGGAGCATGTACTACAATGGATG |
| | | TAAGTTTGCCAGAAGCAAGATCCCAAGGAA |
| | | GTTTAAGCTGCTTGGGGATGACCCAAAAGAGGAAGAGA |
| | | AACTGGAGTCTCATTTGCAAAACCTGTCCACT |
| | | CTTATGGCACCAACATATAAGAAACTTGCACCTGATGCA |
| | | TATAATAATCAGATTGAATATGAACACAGAG |
| | | CACCAGAGTGCCGTCTGGGTCTGAAGGAAGGCCGTCCAT |
| | | TCTCAGGGGTCACTGCATGTTTGGACTTCTG |
| | | TGCTCATGCCCACAGAGACTTGCACAACATGCAGAATGG |
| | | CAGCACATTGGTATGCACTCTCACTAGAGAA |
| | | GACAATCGAGAATTTGGAGGAAAACCTGAGGATGAGCA |
| | | GCTTCACGTTCTGCCTTTATACAAAGTCTCTG |
| | | ACGTGGATGAGTTTGGGAGTGTGGAAGCTCAGGAGGAG |
| | | AAAAAACGGAGTGGTGCCATTCAGGTACTGAG |
| | | TTCTTTTCGGCGAAAAGTCAGGATGTTAGCAGAGCCAGT |
| | | CAAGACTTGCCGACAAAGGAAACTAGAAGCC |
| | | AAGAAAGCTGCAGCTGAAAAGCTTTCCTCCCTGGAGAAC |
| | | AGCTCAAATAAAAATGAAAAGGAAAAGTCAG |
| | | CCCCATCACGTACAAAACAAACTGAAAACGCAAGCCAG |
| | | GCTAAACAGTTGGCAGAACTTTTGCGACTTTC |
| | | AGGACCAGTCATGCAGCAGTCCCAGCAGCCCCAGCCTCT |
| | | ACAGAAGCAGCCACCACAGCCCCAGCAGCAG |
| | | CAGAGACCCCAGCAGCAGCAGCCACATCACCCTCAGAC |
| | | AGAGTCTGTCAACTCTTATTCTGCTTCTGGAT |
| | | CCACCAATCCATACATGAGACGGCCCAATCCAGTTAGTC |
| | | CTTATCCAAACTCTTCACACACTTCAGATAT |
| | | CTATGGAAGCACCAGCCCTATGAACTTCTATTCCACCTC |
| | | ATCTCAAGCTGCAGGTTCATATTTGAATTCT |
| | | TCTAATCCCATGAACCCTTACCCTGGGCTTTTGAATCAGA |
| | | ATACCCAATATCCATCATATCAATGCAATG |
| | | GAAACCTATCAGTGGACAACTGCTCCCCATATCTGGGTT |
| | | CCTATTCTCCCCAGTCTCAGCCGATGGATCT |
| | | GTATAGGTATCCAAGCCAAGACCCTCTGTCTAAGCTCAG |
| | | TCTACCACCCATCCATACACTTTACCAGCCA |
| | | AGGTTTGGAAATAGCCAGAGTTTTACATCTAAATACTTA |
| | | GGTTATGGAAACCAAAATATGCAGGGAGATG |
| | | GTTTCAGCAGTTGTACCATTAGACCAAATGTACATCATG |
| | | TAGGGAAATTGCCTCCTTATCCCACTCATGA |
| | | GATGGATGGCCACTTCATGGGAGCCACCTCTAGATTACC |
| | | ACCCAATCTGAGCAATCCAAACATGGACTAT |
| | | AAAAATGGTGAACATCATTCACCTTCTCACATAATCCAT |
| | | AACTACAGTGCAGCTCCGGGCATGTTCAACA |
| | | GCTCTCTTCATGCCCTGCATCTCCAAAACAAGGAGAATG |
| | | ACATGCTTTCCCACACAGCTAATGGGTTATC |
| | | AAAGATGCTTCCAGCTCTTAACCATGATAGAACTGCTTG |
| | | TGTCCAAGGAGGCTTACACAAATTAAGTGAT |
| | | GCTAATGGTCAGGAAAAGCAGCCATTGGCACTAGTCCAG |
| | | GGTGTGGCTTCTGGTGCAGAGGACAACGATG |
| | | AGGTCTGGTCAGACAGCGAGCAGAGCTTTCTGGATCCTG |
| | | ACATTGGGGGAGTGGCCGTGGCTCCAACTCA |
| | | TGGGTCAATTCTCATTGAGTGTGCAAAGCGTGAGCTGCA |
| | | TGCCACAACCCCTTTAAAGAATCCCAATAGG |
| | | AATCACCCCACCAGGATCTCCCTCGTCTTTTACCAGCATA |
| | | AGAGCATGAATGAGCCAAAACATGGCTTGG |
| | | CTCTTTGGGAAGCCAAAATGGCTGAAAAAGCCCGTGAGA |
| | | AAGAGGAAGAGTGTGAAAAGTATGGCCCAGA |
| | | CTATGTGCCTCAGAAATCCCATGGCAAAAAAGTGAAACG |
| | | GGAGCCTGCTGAGCCACATGAAACTTCAGAG |
| | | CCCACTTACCTGCGTTTCATCAAGTCTCTTGCCGAAAGGA |
| | | CCATGTCCGTGACCACAGACTCCACAGTAA |
| | | CTACATCTCCATATGCCTTCACTCGGGTCACAGGGCCTTA |
| | | CAACAGATATATATGATATCACCCCCTTTT |
| | | GTTGGTTACCTCACTTGAAAAGACCACAACCAACCTGTC |
| | | AGTAGTATAGTTCTCATGACGTGGGCAGTGG |
| | | GGAAAGGTCACAGTATTCATGACAAATGTGGTGGGAAA |
| | | AACCTCAGCTCACCAGCAACAAAAGAGGTTAT |
| | | CTTACCATAGCACTTAATTTTCACTGGCTCCCAAGTGGTC |
| | | ACAGATGGCATCTAGGAAAAGACCAAAGCA |
| | | TTCTATGCAAAAAGAAGGTGGGGAAGAAAGTGTTCCGC |
| | | AATTTACATTTTTAAACACTGGTTCTATTATT |
| | | GGACGAGATGATATGTAAATGTGATCCCCCCCCCCCGCT |
| | | TACAACTCTACACATCTGTGACCACTTTTAA |
| | | TAATATCAAGTTTGCATAGTCATGGAACACAAATCAAAC |
| | | AAGTACTGTAGTATTACAGTGACAGGAATCT |
| | | TAAAATACCATCTGGTGCTGAATATATGATGTACTGAAA |
| | | TACTGGAATTATGGCTTTTTGAAATGCAGTT |
| | | TTTACTGTAATCTTAACTTTTATTTATCAAAATAGCTACA |
| | | GGAAACATGAATAGCAGGAAAACACTGAAT |
| | | TTGTTTGGATGTTCTAAGAAATGGTGCTAAGAAAATGGT |
| | | GTCTTTAATAGCTAAAAATTTAATGCCTTTA |
| | | TATCATCAAGATGCTATCAGTGTACTCCAGTGCCCTTGA |
| | | ATAATAGGGGTACCTTTTCATTCAAGTTTTT |
| | | ATCATAATTACCTATTCTTACACAAGCTTAGTTTTTAAAA |
| | | TGTGGACATTTTAAAGGCCTCTGGATTTTG |
| | | CTCATCCAGTGAAGTCCTTGTAGGACAATAAACGTATAT |
| | | ATGTACATATATACACAAACATGTATATGTG |
| | | CACACACATGTATATGTATAAATATTTTAAATGGTGTTTT |
| | | AGAAGCACTTTGTCTACCTAAGCTTTGACA |
| | | ACTTGAACAATGCTAAGGTACTGAGATGTTTAAAAAACA |
| | | AGTTTACTTTCATTTTAGAATGCAAAGTTGA |
| | | TTTTTTTAAGGAAACAAAGAAAGCTTTTAAAATATTTTTG |
| | | CTTTTAGCCATGCATCTGCTGATGAGCAAT |
| | | TGTGTCCATTTTTAACACAGCCAGTTAAATCCACCATGG |
| | | GGCTTACTGGATTCAAGGGAATACGTTAGTC |
| | | CACAAAACATGTTTTCTGGTGCTCATCTCACATGCTATAC |
| | | TGTAAAACAGTTTTATACAAAATTGTATGA |
| | | CAAGTTCATTGCTCAAAAATGTACAGTTTTAAGAATTTTC |
| | | TATTAACTGCAGGTAATAATTAGCTGCATG |
| | | CTGCAGACTCAACAAAGCTAGTTCACTGAAGCCTATGCT |
| | | ATTTTATGGATCATAGGCTCTTCAGAGAACT |
| | | GAATGGCAGTCTGCCTTTGTGTTGATAATTATGTACATTG |
| | | TGACGTTGTCATTTCTTAGCTTAAGTGTCC |
| | | TCTTTAACAAGAGGATTGAGCAGACTGATGCCTGCATAA |
| | | GATGAATAAACAGGGTTAGTTCCATGTGAAT |
| | | CTGTCAGTTAAAAAGAAACAAAAACAGGCAGCTGGTTTG |
| | | CTGTGGTGGTTTTAAATCATTAATTTGTATA |
| | | AAGAAGTGAAAGAGTTGTATAGTAAATTAAATTGTAAAC |
| | | AAAACTTTTTTAATGCAATGCTTTAGTATTT |
| | | TAGTACTGTAAAAAAATTAAATATATACATATATATATA |
| | | TATATATATATATATATATATGAGTTTGAAG |
| | | CAGAATTCACATCATGATGGTGCTACTCAGCCTGCTACA |
| | | AATATATCATAATGTGAGCTAAGAATTCATT |
| | | AAATGTTTGAGTGATGTTCCTACTTGTCATATACCTCAAC |
| | | ACTAGTTTGGCAATAGGATATTGAACTGAG |
| | | AGTGAAAGCATTGTGTACCATCATTTTTTTCCAAGTCCTT |
| | | TTTTTTATTGTTAAAAAAAAAAGCATACCT |
| | | TTTTTCAATACTTGATTTCTTAGCAAGTATAACTTGAACT |
| | | TCAACCTTTTTGTTCTAAAAATTCAGGGAT |
| | | ATTTCAGCTCATGCTCTCCCTATGCCAACATGTCACCTGT |
| | | GTTTATGTAAAATTGTTGTAGGTTAATAAA |
| | | TATATTCTTTGTCAGGGATTTAACCCTTTTATTTTGAATC |
| | | CCTTCTATTTTACTTGTACATGTGCTGATG |
| | | TAACTAAAACTAATTTTGTAAATCTGTTGGCTCTTTTTAT |
| | | TGTAAAGAAAAGCATTTTAAAAGTTTGAGG |
| | | AATCTTTTGACTGTTTCAAGCAGGAAAAAAAAATTACAT |
| | | GAAAATAGAATGCACTGAGTTGATAAAGGGA |
| | | AAAATTGTAAGGCAGGAGTTTGGCAAGTGGCTGTTGGCC |
| | | AGAGACTTACTTGTAACTCTCTAAATGAAGT |
| | | TTTTTTGATCCTGTAATCACTGAAGGTACATACTCCATGT |
| | | GGACTTCCCTTAAACAGGCAAACACCTACA |
| | | GGTATGGTGTGCAACAGATTGTACAATTACATTTTGGCC |
| | | TAAATACATTTTTGCTTACTAGTATTTAAAA |
| | | TAAATTCTTAATCAGAGGAGGCCTTTGGGTTTTATTGGTC |
| | | AAATCTTTGTAAGCTGGCTTTTGTCTTTTT |
| | | AAAAAATTTCTTGAATTTGTGGTTGTGTCCAATTTGCAAA |
| | | CATTTCCAAAAATGTTTGCTTTGCTTACAA |
| | | ACCACATGATTTTAATGTTTTTTGTATACCATAATATCTA |
| | | GCCCCAAACATTTGATTACTACATGTGCAT |
| | | TGGTGATTTTGATCATCCATTCTTAATATTTGATTTCTGT |
| | | GTCACCTACTGTCATTTGTTAAACTGCTGG |
| | | CCAACAAGAACAGGAAGTATAGTTTGGGGGGTTGGGGA |
| | | GAGTTTACATAAGGAAGAGAAGAAATTGAGTG |
| | | GCATATTGTAAATATCAGATCTATAATTGTAAATATAAA |
| | | ACCTGCCTCAGTTAGAATGAATGGAAAGCAG |
| | | ATCTACAATTTGCTAATATAGGAATATCAGGTTGACTAT |
| | | ATAGCCATACTTGAAAATGCTTCTGAGTGGT |
| | | GTCAACTTTACTTGAATGAATTTTTCATCTTGATTGACGC |
| | | ACAGTGATGTACAGTTCACTTCTGAAGCTA |
| | | GTGGTTAACTTGTGTAGGAAACTTTTGCAGTTTGACACTA |
| | | AGATAACTTCTGTGTGCATTTTTCTATGCT |
| | | TTTTTAAAAACTAGTTTCATTTCATTTTCATGAGATGTTT |
| | | GGTTTATAAGATCTGAGGATGGTTATAAAT |
| | | ACTGTAAGTATTGTAATGTTATGAATGCAGGTTATTTGA |
| | | AAGCTGTTTATTATTATATCATTCCTGATAA |
| | | TGCTATGTGAGTGTTTTTAATAAAATTTATATTTATTTAA |
| | | TGCACTCTAAAAAAAAAAAAAAAAAA |
| PREDICTED: | XM_005263082.1 | AAGCAGAAGGAAGCAAGATGGCTGCCCTTTAGGATTTGT |
| Homo sapiens | | TAGAAAGGAGACCCGACTGCAACTGCTGGAT |
| tet | | TGCTGCAAGGCTGAGGGACGAGAACGAGAATTCAACTA |
| methylcytosine | | GAGGGCAGCCTTGTGGATGGCCCCGAAGCAAG |
| dioxygenase 2 | | CCTGATGGAACAGGATAGAACCAACCATGTTGAGGGCA |
| (TET2), | | ACAGACTAAGTCCATTCCTGATACCATCACCT |
| transcript | | CCCATTTGCCAGACAGAACCTCTGGCTACAAAGCTCCAG |
| variant X1, | | AATGGAAGCCCACTGCCTGAGAGAGCTCATC |
| mRNA | | CAGAAGTAAATGGAGACACCAAGTGGCACTCTTTCAAAA |
| [SEQ ID NO: | | GTTATTATGGAATACCCTGTATGAAGGGAAG |
| 952] | | CCAGAATAGTCGTGTGAGTCCTGACTTTACACAAGAAAG |
| | | TAGAGGGTATTCCAAGTGTTTGCAAAATGGA |
| | | GGAATAAAACGCACAGTTAGTGAACCTTCTCTCTCTGGG |
| | | CTCCTTCAGATCAAGAAATTGAAACAAGACC |
| | | AAAAGGCTAATGGAGAAAGACGTAACTTCGGGGTAAGC |
| | | CAAGAAAGAAATCCAGGTGAAAGCAGTCAACC |
| | | AAATGTCTCCGATTTGAGTGATAAGAAAGAATCTGTGAG |
| | | TTCTGTAGCCCAAGAAAATGCAGTTAAAGAT |
| | | TTCACCAGTTTTTCAACACATAACTGCAGTGGGCCTGAA |
| | | AATCCAGAGCTTCAGATTCTGAATGAGCAGG |
| | | AGGGGAAAAGTGCTAATTACCATGACAAGAACATTGTAT |
| | | TACTTAAAAACAAGGCAGTGCTAATGCCTAA |
| | | TGGTGCTACAGTTTCTGCCTCTTCCGTGGAACACACACAT |
| | | GGTGAACTCCTGGAAAAAACACTGTCTCAA |
| | | TATTATCCAGATTGTGTTTCCATTGCGGTGCAGAAAACC |
| | | ACATCTCACATAAATGCCATTAACAGTCAGG |
| | | CTACTAATGAGTTGTCCTGTGAGATCACTCACCCATCGC |
| | | ATACCTCAGGGCAGATCAATTCCGCACAGAC |
| | | CTCTAACTCTGAGCTGCCTCCAAAGCCAGCTGCAGTGGT |
| | | GAGTGAGGCCTGTGATGCTGATGATGCTGAT |
| | | AATGCCAGTAAACTAGCTGCAATGCTAAATACCTGTTCC |
| | | TTTCAGAAACCAGAACAACTACAACAACAAA |
| | | AATCAGTTTTTGAGATATGCCCATCTCCTGCAGAAAATA |
| | | ACATCCAGGGAACCACAAAGCTAGCGTCTGG |
| | | TGAAGAATTCTGTTCAGGTTCCAGCAGCAATTTGCAAGC |
| | | TCCTGGTGGCAGCTCTGAACGGTATTTAAAA |
| | | CAAAATGAAATGAATGGTGCTTACTTCAAGCAAAGCTCA |
| | | GTGTTCACTAAGGATTCCTTTTCTGCCACTA |
| | | CCACACCACCACCACCATCACAATTGCTTCTTTCTCCCCC |
| | | TCCTCCTCTTCCACAGGTTCCTCAGCTTCC |
| | | TTCAGAAGGAAAAAGCACTCTGAATGGTGGAGTTTTAGA |
| | | AGAACACCACCACTACCCCAACCAAAGTAAC |
| | | ACAACACTTTTAAGGGAAGTGAAAATAGAGGGTAAACC |
| | | TGAGGCACCACCTTCCCAGAGTCCTAATCCAT |
| | | CTACACATGTATGCAGCCCTTCTCCGATGCTTTCTGAAAG |
| | | GCCTCAGAATAATTGTGTGAACAGGAATGA |
| | | CATACAGACTGCAGGGACAATGACTGTTCCATTGTGTTC |
| | | TGAGAAAACAAGACCAATGTCAGAACACCTC |
| | | AAGCATAACCCACCAATTTTTGGTAGCAGTGGAGAGCTA |
| | | CAGGACAACTGCCAGCAGTTGATGAGAAACA |
| | | AAGAGCAAGAGATTCTGAAGGGTCGAGACAAGGAGCAA |
| | | ACACGAGATCTTGTGCCCCCAACACAGCACTA |
| | | TCTGAAACCAGGATGGATTGAATTGAAGGCCCCTCGTTT |
| | | TCACCAAGCGGAATCCCATCTAAAACGTAAT |
| | | GAGGCATCACTGCCATCAATTCTTCAGTATCAACCCAAT |
| | | CTCTCCAATCAAATGACCTCCAAACAATACA |
| | | CTGGAAATTCCAACATGCCTGGGGGGCTCCCAAGGCAAG |
| | | CTTACACCCAGAAAACAACACAGCTGGAGCA |
| | | CAAGTCACAAATGTACCAAGTTGAAATGAATCAAGGGC |
| | | AGTCCCAAGGTACAGTGGACCAACATCTCCAG |
| | | TTCCAAAAACCCTCACACCAGGTGCACTTCTCCAAAACA |
| | | GACCATTTACCAAAAGCTCATGTGCAGTCAC |
| | | TGTGTGGCACTAGATTTCATTTTCAACAAAGAGCAGATT |
| | | CCCAAACTGAAAAACTTATGTCCCCAGTGTT |
| | | GAAACAGCACTTGAATCAACAGGCTTCAGAGACTGAGCC |
| | | ATTTTCAAACTCACACCTTTTGCAACATAAG |
| | | CCTCATAAACAGGCAGCACAAACACAACCATCCCAGAGT |
| | | TCACATCTCCCTCAAAACCAGCAACAGCAGC |
| | | AAAAATTACAAATAAAGAATAAAGAGGAAATACTCCAG |
| | | ACTTTTCCTCACCCCCAAAGCAACAATGATCA |
| | | GCAAAGAGAAGGATCATTCTTTGGCCAGACTAAAGTGGA |
| | | AGAATGTTTTCATGGTGAAAATCAGTATTCA |
| | | AAATCAAGCGAGTTCGAGACTCATAATGTCCAAATGGGA |
| | | CTGGAGGAAGTACAGAATATAAATCGTAGAA |
| | | ATTCCCCTTATAGTCAGACCATGAAATCAAGTGCATGCA |
| | | AAATACAGGTTTCTTGTTCAAACAATACACA |
| | | CCTAGTTTCAGAGAATAAAGAACAGACTACACATCCTGA |
| | | ACTTTTTGCAGGAAACAAGACCCAAAACTTG |
| | | CATCACATGCAATATTTTCCAAATAATGTGATCCCAAAG |
| | | CAAGATCTTCTTCACAGGTGCTTTCAAGAAC |
| | | AGGAGCAGAAGTCACAACAAGCTTCAGTTCTACAGGGAT |
| | | ATAAAAATAGAAACCAAGATATGTCTGGTCA |
| | | ACAAGCTGCGCAACTTGCTCAGCAAAGGTACTTGATACA |
| | | TAACCATGCAAATGTTTTTCCTGTGCCTGAC |
| | | CAGGGAGGAAGTCACACTCAGACCCCTCCCCAGAAGGA |
| | | CACTCAAAAGCATGCTGCTCTAAGGTGGCATC |
| | | TCTTACAGAAGCAAGAACAGCAGCAAACACAGCAACCC |
| | | CAAACTGAGTCTTGCCATAGTCAGATGCACAG |
| | | GCCAATTAAGGTGGAACCTGGATGCAAGCCACATGCCTG |
| | | TATGCACACAGCACCACCAGAAAACAAAACA |
| | | TGGAAAAAGGTAACTAAGCAAGAGAATCCACCTGCAAG |
| | | CTGTGATAATGTGCAGCAAAAGAGCATCATTG |
| | | AGACCATGGAGCAGCATCTGAAGCAGTTTCACGCCAAGT |
| | | CGTTATTTGACCATAAGGCTCTTACTCTCAA |
| | | ATCACAGAAGCAAGTAAAAGTTGAAATGTCAGGGCCAG |
| | | TCACAGTTTTGACTAGACAAACCACTGCTGCA |
| | | GAACTTGATAGCCACACCCCAGCTTTAGAGCAGCAAACA |
| | | ACTTCTTCAGAAAAGACACCAACCAAAAGAA |
| | | CAGCTGCTTCTGTTCTCAATAATTTTATAGAGTCACCTTC |
| | | CAAATTACTAGATACTCCTATAAAAAATTT |
| | | ATTGGATACACCTGTCAAGACTCAATATGATTTCCCATCT |
| | | TGCAGATGTGTAGAGCAAATTATTGAAAAA |
| | | GATGAAGGTCCTTTTTATACCCATCTAGGAGCAGGTCCT |
| | | AATGTGGCAGCTATTAGAGAAATCATGGAAG |
| | | AAAGGTTTGGACAGAAGGGTAAAGCTATTAGGATTGAA |
| | | AGAGTCATCTATACTGGTAAAGAAGGCAAAAG |
| | | TTCTCAGGGATGTCCTATTGCTAAGTGGGTGGTTCGCAG |
| | | AAGCAGCAGTGAAGAGAAGCTACTGTGTTTG |
| | | GTGCGGGAGCGAGCTGGCCACACCTGTGAGGCTGCAGTG |
| | | ATTGTGATTCTCATCCTGGTGTGGGAAGGAA |
| | | TCCCGCTGTCTCTGGCTGACAAACTCTACTCGGAGCTTAC |
| | | CGAGACGCTGAGGAAATACGGCACGCTCAC |
| | | CAATCGCCGGTGTGCCTTGAATGAAGAGAGAACTTGCGC |
| | | CTGTCAGGGGCTGGATCCAGAAACCTGTGGT |
| | | GCCTCCTTCTCTTTTGGTTGTTCATGGAGCATGTACTACA |
| | | ATGGATGTAAGTTTGCCAGAAGCAAGATCC |
| | | CAAGGAAGTTTAAGCTGCTTGGGGATGACCCAAAAGAG |
| | | GAAGAGAAACTGGAGTCTCATTTGCAAAACCT |
| | | GTCCACTCTTATGGCACCAACATATAAGAAACTTGCACC |
| | | TGATGCATATAATAATCAGATTGAATATGAA |
| | | CACAGAGCACCAGAGTGCCGTCTGGGTCTGAAGGAAGG |
| | | CCGTCCATTCTCAGGGGTCACTGCATGTTTGG |
| | | ACTTCTGTGCTCATGCCCACAGAGACTTGCACAACATGC |
| | | AGAATGGCAGCACATTGGTATGCACTCTCAC |
| | | TAGAGAAGACAATCGAGAATTTGGAGGAAAACCTGAGG |
| | | ATGAGCAGCTTCACGTTCTGCCTTTATACAAA |
| | | GTCTCTGACGTGGATGAGTTTGGGAGTGTGGAAGCTCAG |
| | | GAGGAGAAAAAACGGAGTGGTGCCATTCAGG |
| | | TACTGAGTTCTTTTCGGCGAAAAGTCAGGATGTTAGCAG |
| | | AGCCAGTCAAGACTTGCCGACAAAGGAAACT |
| | | AGAAGCCAAGAAAGCTGCAGCTGAAAAGCTTTCCTCCCT |
| | | GGAGAACAGCTCAAATAAAAATGAAAAGGAA |
| | | AAGTCAGCCCCATCACGTACAAAACAAACTGAAAACGC |
| | | AAGCCAGGCTAAACAGTTGGCAGAACTTTTGC |
| | | GACTTTCAGGACCAGTCATGCAGCAGTCCCAGCAGCCCC |
| | | AGCCTCTACAGAAGCAGCCACCACAGCCCCA |
| | | GCAGCAGCAGAGACCCCAGCAGCAGCAGCCACATCACC |
| | | CTCAGACAGAGTCTGTCAACTCTTATTCTGCT |
| | | TCTGGATCCACCAATCCATACATGAGACGGCCCAATCCA |
| | | GTTAGTCCTTATCCAAACTCTTCACACACTT |
| | | CAGATATCTATGGAAGCACCAGCCCTATGAACTTCTATT |
| | | CCACCTCATCTCAAGCTGCAGGTTCATATTT |
| | | GAATTCTTCTAATCCCATGAACCCTTACCCTGGGCTTTTG |
| | | AATCAGAATACCCAATATCCATCATATCAA |
| | | TGCAATGGAAACCTATCAGTGGACAACTGCTCCCCATAT |
| | | CTGGGTTCCTATTCTCCCCAGTCTCAGCCGA |
| | | TGGATCTGTATAGGTATCCAAGCCAAGACCCTCTGTCTA |
| | | AGCTCAGTCTACCACCCATCCATACACTTTA |
| | | CCAGCCAAGGTTTGGAAATAGCCAGAGTTTTACATCTAA |
| | | ATACTTAGGTTATGGAAACCAAAATATGCAG |
| | | GGAGATGGTTTCAGCAGTTGTACCATTAGACCAAATGTA |
| | | CATCATGTAGGGAAATTGCCTCCTTATCCCA |
| | | CTCATGAGATGGATGGCCACTTCATGGGAGCCACCTCTA |
| | | GATTACCACCCAATCTGAGCAATCCAAACAT |
| | | GGACTATAAAAATGGTGAACATCATTCACCTTCTCACAT |
| | | AATCCATAACTACAGTGCAGCTCCGGGCATG |
| | | TTCAACAGCTCTCTTCATGCCCTGCATCTCCAAAACAAG |
| | | GAGAATGACATGCTTTCCCACACAGCTAATG |
| | | GGTTATCAAAGATGCTTCCAGCTCTTAACCATGATAGAA |
| | | CTGCTTGTGTCCAAGGAGGCTTACACAAATT |
| | | AAGTGATGCTAATGGTCAGGAAAAGCAGCCATTGGCACT |
| | | AGTCCAGGGTGTGGCTTCTGGTGCAGAGGAC |
| | | AACGATGAGGTCTGGTCAGACAGCGAGCAGAGCTTTCTG |
| | | GATCCTGACATTGGGGGAGTGGCCGTGGCTC |
| | | CAACTCATGGGTCAATTCTCATTGAGTGTGCAAAGCGTG |
| | | AGCTGCATGCCACAACCCCTTTAAAGAATCC |
| | | CAATAGGAATCACCCCACCAGGATCTCCCTCGTCTTTTAC |
| | | CAGCATAAGAGCATGAATGAGCCAAAACAT |
| | | GGCTTGGCTCTTTGGGAAGCCAAAATGGCTGAAAAAGCC |
| | | CGTGAGAAAGAGGAAGAGTGTGAAAAGTATG |
| | | GCCCAGACTATGTGCCTCAGAAATCCCATGGCAAAAAAG |
| | | TGAAACGGGAGCCTGCTGAGCCACATGAAAC |
| | | TTCAGAGCCCACTTACCTGCGTTTCATCAAGTCTCTTGCC |
| | | GAAAGGACCATGTCCGTGACCACAGACTCC |
| | | ACAGTAACTACATCTCCATATGCCTTCACTCGGGTCACA |
| | | GGGCCTTACAACAGATATATATGATATCACC |
| | | CCCTTTTGTTGGTTACCTCACTTGAAAAGACCACAACCA |
| | | ACCTGTCAGTAGTATAGTTCTCATGACGTGG |
| | | GCAGTGGGGAAAGGTCACAGTATTCATGACAAATGTGGT |
| | | GGGAAAAACCTCAGCTCACCAGCAACAAAAG |
| | | AGGTTATCTTACCATAGCACTTAATTTTCACTGGCTCCCA |
| | | AGTGGTCACAGATGGCATCTAGGAAAAGAC |
| | | CAAAGCATTCTATGCAAAAAGAAGGTGGGGAAGAAAGT |
| | | GTTCCGCAATTTACATTTTTAAACACTGGTTC |
| | | TATTATTGGACGAGATGATATGTAAATGTGATCCCCCCC |
| | | CCCCGCTTACAACTCTACACATCTGTGACCA |
| | | CTTTTAATAATATCAAGTTTGCATAGTCATGGAACACAA |
| | | ATCAAACAAGTACTGTAGTATTACAGTGACA |
| | | GGAATCTTAAAATACCATCTGGTGCTGAATATATGATGT |
| | | ACTGAAATACTGGAATTATGGCTTTTTGAAA |
| | | TGCAGTTTTTACTGTAATCTTAACTTTTATTTATCAAAAT |
| | | AGCTACAGGAAACATGAATAGCAGGAAAAC |
| | | ACTGAATTTGTTTGGATGTTCTAAGAAATGGTGCTAAGA |
| | | AAATGGTGTCTTTAATAGCTAAAAATTTAAT |
| | | GCCTTTATATCATCAAGATGCTATCAGTGTACTCCAGTGC |
| | | CCTTGAATAATAGGGGTACCTTTTCATTCA |
| | | AGTTTTTATCATAATTACCTATTCTTACACAAGCTTAGTT |
| | | TTTAAAATGTGGACATTTTAAAGGCCTCTG |
| | | GATTTTGCTCATCCAGTGAAGTCCTTGTAGGACAATAAA |
| | | CGTATATATGTACATATATACACAAACATGT |
| | | ATATGTGCACACACATGTATATGTATAAATATTTTAAAT |
| | | GGTGTTTTAGAAGCACTTTGTCTACCTAAGC |
| | | TTTGACAACTTGAACAATGCTAAGGTACTGAGATGTTTA |
| | | AAAAACAAGTTTACTTTCATTTTAGAATGCA |
| | | AAGTTGATTTTTTTAAGGAAACAAAGAAAGCTTTTAAAA |
| | | TATTTTTGCTTTTAGCCATGCATCTGCTGAT |
| | | GAGCAATTGTGTCCATTTTTAACACAGCCAGTTAAATCC |
| | | ACCATGGGGCTTACTGGATTCAAGGGAATAC |
| | | GTTAGTCCACAAAACATGTTTTCTGGTGCTCATCTCACAT |
| | | GCTATACTGTAAAACAGTTTTATACAAAAT |
| | | TGTATGACAAGTTCATTGCTCAAAAATGTACAGTTTTAA |
| | | GAATTTTCTATTAACTGCAGGTAATAATTAG |
| | | CTGCATGCTGCAGACTCAACAAAGCTAGTTCACTGAAGC |
| | | CTATGCTATTTTATGGATCATAGGCTCTTCA |
| | | GAGAACTGAATGGCAGTCTGCCTTTGTGTTGATAATTAT |
| | | GTACATTGTGACGTTGTCATTTCTTAGCTTA |
| | | AGTGTCCTCTTTAACAAGAGGATTGAGCAGACTGATGCC |
| | | TGCATAAGATGAATAAACAGGGTTAGTTCCA |
| | | TGTGAATCTGTCAGTTAAAAAGAAACAAAAACAGGCAG |
| | | CTGGTTTGCTGTGGTGGTTTTAAATCATTAAT |
| | | TTGTATAAAGAAGTGAAAGAGTTGTATAGTAAATTAAAT |
| | | TGTAAACAAAACTTTTTTAATGCAATGCTTT |
| | | AGTATTTTAGTACTGTAAAAAAATTAAATATATACATAT |
| | | ATATATATATATATATATATATATATATGAG |
| | | TTTGAAGCAGAATTCACATCATGATGGTGCTACTCAGCC |
| | | TGCTACAAATATATCATAATGTGAGCTAAGA |
| | | ATTCATTAAATGTTTGAGTGATGTTCCTACTTGTCATATA |
| | | CCTCAACACTAGTTTGGCAATAGGATATTG |
| | | AACTGAGAGTGAAAGCATTGTGTACCATCATTTTTTTCCA |
| | | AGTCCTTTTTTTTATTGTTAAAAAAAAAAG |
| | | CATACCTTTTTTCAATACTTGATTTCTTAGCAAGTATAAC |
| | | TTGAACTTCAACCTTTTTGTTCTAAAAATT |
| | | CAGGGATATTTCAGCTCATGCTCTCCCTATGCCAACATGT |
| | | CACCTGTGTTTATGTAAAATTGTTGTAGGT |
| | | TAATAAATATATTCTTTGTCAGGGATTTAACCCTTTTATT |
| | | TTGAATCCCTTCTATTTTACTTGTACATGT |
| | | GCTGATGTAACTAAAACTAATTTTGTAAATCTGTTGGCTC |
| | | TTTTTATTGTAAAGAAAAGCATTTTAAAAG |
| | | TTTGAGGAATCTTTTGACTGTTTCAAGCAGGAAAAAAAA |
| | | ATTACATGAAAATAGAATGCACTGAGTTGAT |
| | | AAAGGGAAAAATTGTAAGGCAGGAGTTTGGCAAGTGGC |
| | | TGTTGGCCAGAGACTTACTTGTAACTCTCTAA |
| | | ATGAAGTTTTTTTGATCCTGTAATCACTGAAGGTACATAC |
| | | TCCATGTGGACTTCCCTTAAACAGGCAAAC |
| | | ACCTACAGGTATGGTGTGCAACAGATTGTACAATTACAT |
| | | TTTGGCCTAAATACATTTTTGCTTACTAGTA |
| | | TTTAAAATAAATTCTTAATCAGAGGAGGCCTTTGGGTTTT |
| | | ATTGGTCAAATCTTTGTAAGCTGGCTTTTG |
| | | TCTTTTTAAAAAATTTCTTGAATTTGTGGTTGTGTCCAAT |
| | | TTGCAAACATTTCCAAAAATGTTTGCTTTG |
| | | CTTACAAACCACATGATTTTAATGTTTTTTGTATACCATA |
| | | ATATCTAGCCCCAAACATTTGATTACTACA |
| | | TGTGCATTGGTGATTTTGATCATCCATTCTTAATATTTGA |
| | | TTTCTGTGTCACCTACTGTCATTTGTTAAA |
| | | CTGCTGGCCAACAAGAACAGGAAGTATAGTTTGGGGGGT |
| | | TGGGGAGAGTTTACATAAGGAAGAGAAGAAA |
| | | TTGAGTGGCATATTGTAAATATCAGATCTATAATTGTAA |
| | | ATATAAAACCTGCCTCAGTTAGAATGAATGG |
| | | AAAGCAGATCTACAATTTGCTAATATAGGAATATCAGGT |
| | | TGACTATATAGCCATACTTGAAAATGCTTCT |
| | | GAGTGGTGTCAACTTTACTTGAATGAATTTTTCATCTTGA |
| | | TTGACGCACAGTGATGTACAGTTCACTTCT |
| | | GAAGCTAGTGGTTAACTTGTGTAGGAAACTTTTGCAGTT |
| | | TGACACTAAGATAACTTCTGTGTGCATTTTT |
| | | CTATGCTTTTTTAAAAACTAGTTTCATTTCATTTTCATGA |
| | | GATGTTTGGTTTATAAGATCTGAGGATGGT |
| | | TATAAATACTGTAAGTATTGTAATGTTATGAATGCAGGT |
| | | TATTTGAAAGCTGTTTATTATTATATCATTC |
| | | CTGATAATGCTATGTGAGTGTTTTTAATAAAATTTATATT |
| | | TATTTAATGCACTCTAA |
| PREDICTED: | XM_006714242.2 | GTAGAGAAGCAGAAGGAAGCAAGATGGCTGCCCTTTAG |
| Homo sapiens | | GATTTGTTAGAAAGGAGACCCGACTGCAACTG |
| tet | | CTGGATTGCTGCAAGGCTGAGGGACGAGAACGAGGCTG |
| methylcytosine | | GCAAACATTCAGCAGCACACCCTCTCAAGATT |
| dioxygenase 2 | | GTTTACTTGCCTTTGCTCCTGTTGAGTTACAACGCTTGGA |
| (TET2), | | AGCAGGAGATGGGCTCAGCAGCAGCCAATA |
| transcript | | GGACATGATCCAGGAAGAGCAGTAAGGGACTGAGCTGC |
| variant X2, | | TGAATTCAACTAGAGGGCAGCCTTGTGGATGG |
| mRNA | | CCCCGAAGCAAGCCTGATGGAACAGGATAGAACCAACC |
| [SEQ ID NO: | | ATGTTGAGGGCAACAGACTAAGTCCATTCCTG |
| 953] | | ATACCATCACCTCCCATTTGCCAGACAGAACCTCTGGCT |
| | | ACAAAGCTCCAGAATGGAAGCCCACTGCCTG |
| | | AGAGAGCTCATCCAGAAGTAAATGGAGACACCAAGTGG |
| | | CACTCTTTCAAAAGTTATTATGGAATACCCTG |
| | | TATGAAGGGAAGCCAGAATAGTCGTGTGAGTCCTGACTT |
| | | TACACAAGAAAGTAGAGGGTATTCCAAGTGT |
| | | TTGCAAAATGGAGGAATAAAACGCACAGTTAGTGAACCT |
| | | TCTCTCTCTGGGCTCCTTCAGATCAAGAAAT |
| | | TGAAACAAGACCAAAAGGCTAATGGAGAAAGACGTAAC |
| | | TTCGGGGTAAGCCAAGAAAGAAATCCAGGTGA |
| | | AAGCAGTCAACCAAATGTCTCCGATTTGAGTGATAAGAA |
| | | AGAATCTGTGAGTTCTGTAGCCCAAGAAAAT |
| | | GCAGTTAAAGATTTCACCAGTTTTTCAACACATAACTGC |
| | | AGTGGGCCTGAAAATCCAGAGCTTCAGATTC |
| | | TGAATGAGCAGGAGGGGAAAAGTGCTAATTACCATGAC |
| | | AAGAACATTGTATTACTTAAAAACAAGGCAGT |
| | | GCTAATGCCTAATGGTGCTACAGTTTCTGCCTCTTCCGTG |
| | | GAACACACACATGGTGAACTCCTGGAAAAA |
| | | ACACTGTCTCAATATTATCCAGATTGTGTTTCCATTGCGG |
| | | TGCAGAAAACCACATCTCACATAAATGCCA |
| | | TTAACAGTCAGGCTACTAATGAGTTGTCCTGTGAGATCA |
| | | CTCACCCATCGCATACCTCAGGGCAGATCAA |
| | | TTCCGCACAGACCTCTAACTCTGAGCTGCCTCCAAAGCC |
| | | AGCTGCAGTGGTGAGTGAGGCCTGTGATGCT |
| | | GATGATGCTGATAATGCCAGTAAACTAGCTGCAATGCTA |
| | | AATACCTGTTCCTTTCAGAAACCAGAACAAC |
| | | TACAACAACAAAAATCAGTTTTTGAGATATGCCCATCTC |
| | | CTGCAGAAAATAACATCCAGGGAACCACAAA |
| | | GCTAGCGTCTGGTGAAGAATTCTGTTCAGGTTCCAGCAG |
| | | CAATTTGCAAGCTCCTGGTGGCAGCTCTGAA |
| | | CGGTATTTAAAACAAAATGAAATGAATGGTGCTTACTTC |
| | | AAGCAAAGCTCAGTGTTCACTAAGGATTCCT |
| | | TTTCTGCCACTACCACACCACCACCACCATCACAATTGCT |
| | | TCTTTCTCCCCCTCCTCCTCTTCCACAGGT |
| | | TCCTCAGCTTCCTTCAGAAGGAAAAAGCACTCTGAATGG |
| | | TGGAGTTTTAGAAGAACACCACCACTACCCC |
| | | AACCAAAGTAACACAACACTTTTAAGGGAAGTGAAAAT |
| | | AGAGGGTAAACCTGAGGCACCACCTTCCCAGA |
| | | GTCCTAATCCATCTACACATGTATGCAGCCCTTCTCCGAT |
| | | GCTTTCTGAAAGGCCTCAGAATAATTGTGT |
| | | GAACAGGAATGACATACAGACTGCAGGGACAATGACTG |
| | | TTCCATTGTGTTCTGAGAAAACAAGACCAATG |
| | | TCAGAACACCTCAAGCATAACCCACCAATTTTTGGTAGC |
| | | AGTGGAGAGCTACAGGACAACTGCCAGCAGT |
| | | TGATGAGAAACAAAGAGCAAGAGATTCTGAAGGGTCGA |
| | | GACAAGGAGCAAACACGAGATCTTGTGCCCCC |
| | | AACACAGCACTATCTGAAACCAGGATGGATTGAATTGAA |
| | | GGCCCCTCGTTTTCACCAAGCGGAATCCCAT |
| | | CTAAAACGTAATGAGGCATCACTGCCATCAATTCTTCAG |
| | | TATCAACCCAATCTCTCCAATCAAATGACCT |
| | | CCAAACAATACACTGGAAATTCCAACATGCCTGGGGGGC |
| | | TCCCAAGGCAAGCTTACACCCAGAAAACAAC |
| | | ACAGCTGGAGCACAAGTCACAAATGTACCAAGTTGAAAT |
| | | GAATCAAGGGCAGTCCCAAGGTACAGTGGAC |
| | | CAACATCTCCAGTTCCAAAAACCCTCACACCAGGTGCAC |
| | | TTCTCCAAAACAGACCATTTACCAAAAGCTC |
| | | ATGTGCAGTCACTGTGTGGCACTAGATTTCATTTTCAACA |
| | | AAGAGCAGATTCCCAAACTGAAAAACTTAT |
| | | GTCCCCAGTGTTGAAACAGCACTTGAATCAACAGGCTTC |
| | | AGAGACTGAGCCATTTTCAAACTCACACCTT |
| | | TTGCAACATAAGCCTCATAAACAGGCAGCACAAACACA |
| | | ACCATCCCAGAGTTCACATCTCCCTCAAAACC |
| | | AGCAACAGCAGCAAAAATTACAAATAAAGAATAAAGAG |
| | | GAAATACTCCAGACTTTTCCTCACCCCCAAAG |
| | | CAACAATGATCAGCAAAGAGAAGGATCATTCTTTGGCCA |
| | | GACTAAAGTGGAAGAATGTTTTCATGGTGAA |
| | | AATCAGTATTCAAAATCAAGCGAGTTCGAGACTCATAAT |
| | | GTCCAAATGGGACTGGAGGAAGTACAGAATA |
| | | TAAATCGTAGAAATTCCCCTTATAGTCAGACCATGAAAT |
| | | CAAGTGCATGCAAAATACAGGTTTCTTGTTC |
| | | AAACAATACACACCTAGTTTCAGAGAATAAAGAACAGA |
| | | CTACACATCCTGAACTTTTTGCAGGAAACAAG |
| | | ACCCAAAACTTGCATCACATGCAATATTTTCCAAATAAT |
| | | GTGATCCCAAAGCAAGATCTTCTTCACAGGT |
| | | GCTTTCAAGAACAGGAGCAGAAGTCACAACAAGCTTCA |
| | | GTTCTACAGGGATATAAAAATAGAAACCAAGA |
| | | TATGTCTGGTCAACAAGCTGCGCAACTTGCTCAGCAAAG |
| | | GTACTTGATACATAACCATGCAAATGTTTTT |
| | | CCTGTGCCTGACCAGGGAGGAAGTCACACTCAGACCCCT |
| | | CCCCAGAAGGACACTCAAAAGCATGCTGCTC |
| | | TAAGGTGGCATCTCTTACAGAAGCAAGAACAGCAGCAA |
| | | ACACAGCAACCCCAAACTGAGTCTTGCCATAG |
| | | TCAGATGCACAGGCCAATTAAGGTGGAACCTGGATGCAA |
| | | GCCACATGCCTGTATGCACACAGCACCACCA |
| | | GAAAACAAAACATGGAAAAAGGTAACTAAGCAAGAGAA |
| | | TCCACCTGCAAGCTGTGATAATGTGCAGCAAA |
| | | AGAGCATCATTGAGACCATGGAGCAGCATCTGAAGCAGT |
| | | TTCACGCCAAGTCGTTATTTGACCATAAGGC |
| | | TCTTACTCTCAAATCACAGAAGCAAGTAAAAGTTGAAAT |
| | | GTCAGGGCCAGTCACAGTTTTGACTAGACAA |
| | | ACCACTGCTGCAGAACTTGATAGCCACACCCCAGCTTTA |
| | | GAGCAGCAAACAACTTCTTCAGAAAAGACAC |
| | | CAACCAAAAGAACAGCTGCTTCTGTTCTCAATAATTTTAT |
| | | AGAGTCACCTTCCAAATTACTAGATACTCC |
| | | TATAAAAAATTTATTGGATACACCTGTCAAGACTCAATA |
| | | TGATTTCCCATCTTGCAGATGTGTAGGTTTG |
| | | GACAGAAGGGTAAAGCTATTAGGATTGAAAGAGTCATCT |
| | | ATACTGGTAAAGAAGGCAAAAGTTCTCAGGG |
| | | ATGTCCTATTGCTAAGTGGGAGAACTTGCGCCTGTCAGG |
| | | GGCTGGATCCAGAAACCTGTGGTGCCTCCTT |
| | | CTCTTTTGGTTGTTCATGGAGCATGTACTACAATGGATGT |
| | | AAGTTTGCCAGAAGCAAGATCCCAAGGAAG |
| | | TTTAAGCTGCTTGGGGATGACCCAAAAGAGGAAGAGAA |
| | | ACTGGAGTCTCATTTGCAAAACCTGTCCACTC |
| | | TTATGGCACCAACATATAAGAAACTTGCACCTGATGCAT |
| | | ATAATAATCAGATTGAATATGAACACAGAGC |
| | | ACCAGAGTGCCGTCTGGGTCTGAAGGAAGGCCGTCCATT |
| | | CTCAGGGGTCACTGCATGTTTGGACTTCTGT |
| | | GCTCATGCCCACAGAGACTTGCACAACATGCAGAATGGC |
| | | AGCACATTGGTATGCACTCTCACTAGAGAAG |
| | | ACAATCGAGAATTTGGAGGAAAACCTGAGGATGAGCAG |
| | | CTTCACGTTCTGCCTTTATACAAAGTCTCTGA |
| | | CGTGGATGAGTTTGGGAGTGTGGAAGCTCAGGAGGAGA |
| | | AAAAACGGAGTGGTGCCATTCAGGTACTGAGT |
| | | TCTTTTCGGCGAAAAGTCAGGATGTTAGCAGAGCCAGTC |
| | | AAGACTTGCCGACAAAGGAAACTAGAAGCCA |
| | | AGAAAGCTGCAGCTGAAAAGCTTTCCTCCCTGGAGAACA |
| | | GCTCAAATAAAAATGAAAAGGAAAAGTCAGC |
| | | CCCATCACGTACAAAACAAACTGAAAACGCAAGCCAGG |
| | | CTAAACAGTTGGCAGAACTTTTGCGACTTTCA |
| | | GGACCAGTCATGCAGCAGTCCCAGCAGCCCCAGCCTCTA |
| | | CAGAAGCAGCCACCACAGCCCCAGCAGCAGC |
| | | AGAGACCCCAGCAGCAGCAGCCACATCACCCTCAGACA |
| | | GAGTCTGTCAACTCTTATTCTGCTTCTGGATC |
| | | CACCAATCCATACATGAGACGGCCCAATCCAGTTAGTCC |
| | | TTATCCAAACTCTTCACACACTTCAGATATC |
| | | TATGGAAGCACCAGCCCTATGAACTTCTATTCCACCTCAT |
| | | CTCAAGCTGCAGGTTCATATTTGAATTCTT |
| | | CTAATCCCATGAACCCTTACCCTGGGCTTTTGAATCAGA |
| | | ATACCCAATATCCATCATATCAATGCAATGG |
| | | AAACCTATCAGTGGACAACTGCTCCCCATATCTGGGTTC |
| | | CTATTCTCCCCAGTCTCAGCCGATGGATCTG |
| | | TATAGGTATCCAAGCCAAGACCCTCTGTCTAAGCTCAGT |
| | | CTACCACCCATCCATACACTTTACCAGCCAA |
| | | GGTTTGGAAATAGCCAGAGTTTTACATCTAAATACTTAG |
| | | GTTATGGAAACCAAAATATGCAGGGAGATGG |
| | | TTTCAGCAGTTGTACCATTAGACCAAATGTACATCATGT |
| | | AGGGAAATTGCCTCCTTATCCCACTCATGAG |
| | | ATGGATGGCCACTTCATGGGAGCCACCTCTAGATTACCA |
| | | CCCAATCTGAGCAATCCAAACATGGACTATA |
| | | AAAATGGTGAACATCATTCACCTTCTCACATAATCCATA |
| | | ACTACAGTGCAGCTCCGGGCATGTTCAACAG |
| | | CTCTCTTCATGCCCTGCATCTCCAAAACAAGGAGAATGA |
| | | CATGCTTTCCCACACAGCTAATGGGTTATCA |
| | | AAGATGCTTCCAGCTCTTAACCATGATAGAACTGCTTGT |
| | | GTCCAAGGAGGCTTACACAAATTAAGTGATG |
| | | CTAATGGTCAGGAAAAGCAGCCATTGGCACTAGTCCAGG |
| | | GTGTGGCTTCTGGTGCAGAGGACAACGATGA |
| | | GGTCTGGTCAGACAGCGAGCAGAGCTTTCTGGATCCTGA |
| | | CATTGGGGGAGTGGCCGTGGCTCCAACTCAT |
| | | GGGTCAATTCTCATTGAGTGTGCAAAGCGTGAGCTGCAT |
| | | GCCACAACCCCTTTAAAGAATCCCAATAGGA |
| | | ATCACCCCACCAGGATCTCCCTCGTCTTTTACCAGCATAA |
| | | GAGCATGAATGAGCCAAAACATGGCTTGGC |
| | | TCTTTGGGAAGCCAAAATGGCTGAAAAAGCCCGTGAGA |
| | | AAGAGGAAGAGTGTGAAAAGTATGGCCCAGAC |
| | | TATGTGCCTCAGAAATCCCATGGCAAAAAAGTGAAACGG |
| | | GAGCCTGCTGAGCCACATGAAACTTCAGAGC |
| | | CCACTTACCTGCGTTTCATCAAGTCTCTTGCCGAAAGGAC |
| | | CATGTCCGTGACCACAGACTCCACAGTAAC |
| | | TACATCTCCATATGCCTTCACTCGGGTCACAGGGCCTTAC |
| | | AACAGATATATATGATATCACCCCCTTTTG |
| | | TTGGTTACCTCACTTGAAAAGACCACAACCAACCTGTCA |
| | | GTAGTATAGTTCTCATGACGTGGGCAGTGGG |
| | | GAAAGGTCACAGTATTCATGACAAATGTGGTGGGAAAA |
| | | ACCTCAGCTCACCAGCAACAAAAGAGGTTATC |
| | | TTACCATAGCACTTAATTTTCACTGGCTCCCAAGTGGTCA |
| | | CAGATGGCATCTAGGAAAAGACCAAAGCAT |
| | | TCTATGCAAAAAGAAGGTGGGGAAGAAAGTGTTCCGCA |
| | | ATTTACATTTTTAAACACTGGTTCTATTATTG |
| | | GACGAGATGATATGTAAATGTGATCCCCCCCCCCCGCTT |
| | | ACAACTCTACACATCTGTGACCACTTTTAAT |
| | | AATATCAAGTTTGCATAGTCATGGAACACAAATCAAACA |
| | | AGTACTGTAGTATTACAGTGACAGGAATCTT |
| | | AAAATACCATCTGGTGCTGAATATATGATGTACTGAAAT |
| | | ACTGGAATTATGGCTTTTTGAAATGCAGTTT |
| | | TTACTGTAATCTTAACTTTTATTTATCAAAATAGCTACAG |
| | | GAAACATGAATAGCAGGAAAACACTGAATT |
| | | TGTTTGGATGTTCTAAGAAATGGTGCTAAGAAAATGGTG |
| | | TCTTTAATAGCTAAAAATTTAATGCCTTTAT |
| | | ATCATCAAGATGCTATCAGTGTACTCCAGTGCCCTTGAA |
| | | TAATAGGGGTACCTTTTCATTCAAGTTTTTA |
| | | TCATAATTACCTATTCTTACACAAGCTTAGTTTTTAAAAT |
| | | GTGGACATTTTAAAGGCCTCTGGATTTTGC |
| | | TCATCCAGTGAAGTCCTTGTAGGACAATAAACGTATATA |
| | | TGTACATATATACACAAACATGTATATGTGC |
| | | ACACACATGTATATGTATAAATATTTTAAATGGTGTTTTA |
| | | GAAGCACTTTGTCTACCTAAGCTTTGACAA |
| | | CTTGAACAATGCTAAGGTACTGAGATGTTTAAAAAACAA |
| | | GTTTACTTTCATTTTAGAATGCAAAGTTGAT |
| | | TTTTTTAAGGAAACAAAGAAAGCTTTTAAAATATTTTTGC |
| | | TTTTAGCCATGCATCTGCTGATGAGCAATT |
| | | GTGTCCATTTTTAACACAGCCAGTTAAATCCACCATGGG |
| | | GCTTACTGGATTCAAGGGAATACGTTAGTCC |
| | | ACAAAACATGTTTTCTGGTGCTCATCTCACATGCTATACT |
| | | GTAAAACAGTTTTATACAAAATTGTATGAC |
| | | AAGTTCATTGCTCAAAAATGTACAGTTTTAAGAATTTTCT |
| | | ATTAACTGCAGGTAATAATTAGCTGCATGC |
| | | TGCAGACTCAACAAAGCTAGTTCACTGAAGCCTATGCTA |
| | | TTTTATGGATCATAGGCTCTTCAGAGAACTG |
| | | AATGGCAGTCTGCCTTTGTGTTGATAATTATGTACATTGT |
| | | GACGTTGTCATTTCTTAGCTTAAGTGTCCT |
| | | CTTTAACAAGAGGATTGAGCAGACTGATGCCTGCATAAG |
| | | ATGAATAAACAGGGTTAGTTCCATGTGAATC |
| | | TGTCAGTTAAAAAGAAACAAAAACAGGCAGCTGGTTTGC |
| | | TGTGGTGGTTTTAAATCATTAATTTGTATAA |
| | | AGAAGTGAAAGAGTTGTATAGTAAATTAAATTGTAAACA |
| | | AAACTTTTTTAATGCAATGCTTTAGTATTTT |
| | | AGTACTGTAAAAAAATTAAATATATACATATATATATAT |
| | | ATATATATATATATATATATGAGTTTGAAGC |
| | | AGAATTCACATCATGATGGTGCTACTCAGCCTGCTACAA |
| | | ATATATCATAATGTGAGCTAAGAATTCATTA |
| | | AATGTTTGAGTGATGTTCCTACTTGTCATATACCTCAACA |
| | | CTAGTTTGGCAATAGGATATTGAACTGAGA |
| | | GTGAAAGCATTGTGTACCATCATTTTTTTCCAAGTCCTTT |
| | | TTTTTATTGTTAAAAAAAAAAGCATACCTT |
| | | TTTTCAATACTTGATTTCTTAGCAAGTATAACTTGAACTT |
| | | CAACCTTTTTGTTCTAAAAATTCAGGGATA |
| | | TTTCAGCTCATGCTCTCCCTATGCCAACATGTCACCTGTG |
| | | TTTATGTAAAATTGTTGTAGGTTAATAAAT |
| | | ATATTCTTTGTCAGGGATTTAACCCTTTTATTTTGAATCC |
| | | CTTCTATTTTACTTGTACATGTGCTGATGT |
| | | AACTAAAACTAATTTTGTAAATCTGTTGGCTCTTTTTATT |
| | | GTAAAGAAAAGCATTTTAAAAGTTTGAGGA |
| | | ATCTTTTGACTGTTTCAAGCAGGAAAAAAAAATTACATG |
| | | AAAATAGAATGCACTGAGTTGATAAAGGGAA |
| | | AAATTGTAAGGCAGGAGTTTGGCAAGTGGCTGTTGGCCA |
| | | GAGACTTACTTGTAACTCTCTAAATGAAGTT |
| | | TTTTTGATCCTGTAATCACTGAAGGTACATACTCCATGTG |
| | | GACTTCCCTTAAACAGGCAAACACCTACAG |
| | | GTATGGTGTGCAACAGATTGTACAATTACATTTTGGCCT |
| | | AAATACATTTTTGCTTACTAGTATTTAAAAT |
| | | AAATTCTTAATCAGAGGAGGCCTTTGGGTTTTATTGGTCA |
| | | AATCTTTGTAAGCTGGCTTTTGTCTTTTTA |
| | | AAAAATTTCTTGAATTTGTGGTTGTGTCCAATTTGCAAAC |
| | | ATTTCCAAAAATGTTTGCTTTGCTTACAAA |
| | | CCACATGATTTTAATGTTTTTTGTATACCATAATATCTAG |
| | | CCCCAAACATTTGATTACTACATGTGCATT |
| | | GGTGATTTTGATCATCCATTCTTAATATTTGATTTCTGTG |
| | | TCACCTACTGTCATTTGTTAAACTGCTGGC |
| | | CAACAAGAACAGGAAGTATAGTTTGGGGGGTTGGGGAG |
| | | AGTTTACATAAGGAAGAGAAGAAATTGAGTGG |
| | | CATATTGTAAATATCAGATCTATAATTGTAAATATAAAA |
| | | CCTGCCTCAGTTAGAATGAATGGAAAGCAGA |
| | | TCTACAATTTGCTAATATAGGAATATCAGGTTGACTATAT |
| | | AGCCATACTTGAAAATGCTTCTGAGTGGTG |
| | | TCAACTTTACTTGAATGAATTTTTCATCTTGATTGACGCA |
| | | CAGTGATGTACAGTTCACTTCTGAAGCTAG |
| | | TGGTTAACTTGTGTAGGAAACTTTTGCAGTTTGACACTAA |
| | | GATAACTTCTGTGTGCATTTTTCTATGCTT |
| | | TTTTAAAAACTAGTTTCATTTCATTTTCATGAGATGTTTG |
| | | GTTTATAAGATCTGAGGATGGTTATAAATA |
| | | CTGTAAGTATTGTAATGTTATGAATGCAGGTTATTTGAA |
| | | AGCTGTTTATTATTATATCATTCCTGATAAT |
| | | GCTATGTGAGTGTTTTTAATAAAATTTATATTTATTTAAT |
| | | GCACTCTAA |
| Homo sapiens | NM_017628.4 | AAACAGAAGGTGGGCCGGGGGGGGGAGAAACAGAACTC |
| tet | | GGTCAATTTCCCAGTTTGTCGGGTCTTTAAAA |
| methylcytosine | | ATACAGGCCCCTAAAGCACTAAGGGCATGCCCTCGGTGA |
| dioxygenase 2 | | AACAGGGGAGCGCTTCTGCTGAATGAGATTA |
| (TET2), | | AAGCGACAGAAAAGGGAAAGGAGAGCGCGGGCAACGG |
| transcript | | GATCTAAAGGGAGATAGAGACGCGGGCCTCTGA |
| variant 2, | | GGGCTGGCAAACATTCAGCAGCACACCCTCTCAAGATTG |
| mRNA | | TTTACTTGCCTTTGCTCCTGTTGAGTTACAA |
| [SEQ ID NO: | | CGCTTGGAAGCAGGAGATGGGCTCAGCAGCAGCCAATA |
| 954] | | GGACATGATCCAGGAAGAGCAGTAAGGGACTG |
| | | AGCTGCTGAATTCAACTAGAGGGCAGCCTTGTGGATGGC |
| | | CCCGAAGCAAGCCTGATGGAACAGGATAGAA |
| | | CCAACCATGTTGAGGGCAACAGACTAAGTCCATTCCTGA |
| | | TACCATCACCTCCCATTTGCCAGACAGAACC |
| | | TCTGGCTACAAAGCTCCAGAATGGAAGCCCACTGCCTGA |
| | | GAGAGCTCATCCAGAAGTAAATGGAGACACC |
| | | AAGTGGCACTCTTTCAAAAGTTATTATGGAATACCCTGT |
| | | ATGAAGGGAAGCCAGAATAGTCGTGTGAGTC |
| | | CTGACTTTACACAAGAAAGTAGAGGGTATTCCAAGTGTT |
| | | TGCAAAATGGAGGAATAAAACGCACAGTTAG |
| | | TGAACCTTCTCTCTCTGGGCTCCTTCAGATCAAGAAATTG |
| | | AAACAAGACCAAAAGGCTAATGGAGAAAGA |
| | | CGTAACTTCGGGGTAAGCCAAGAAAGAAATCCAGGTGA |
| | | AAGCAGTCAACCAAATGTCTCCGATTTGAGTG |
| | | ATAAGAAAGAATCTGTGAGTTCTGTAGCCCAAGAAAATG |
| | | CAGTTAAAGATTTCACCAGTTTTTCAACACA |
| | | TAACTGCAGTGGGCCTGAAAATCCAGAGCTTCAGATTCT |
| | | GAATGAGCAGGAGGGGAAAAGTGCTAATTAC |
| | | CATGACAAGAACATTGTATTACTTAAAAACAAGGCAGTG |
| | | CTAATGCCTAATGGTGCTACAGTTTCTGCCT |
| | | CTTCCGTGGAACACACACATGGTGAACTCCTGGAAAAAA |
| | | CACTGTCTCAATATTATCCAGATTGTGTTTC |
| | | CATTGCGGTGCAGAAAACCACATCTCACATAAATGCCAT |
| | | TAACAGTCAGGCTACTAATGAGTTGTCCTGT |
| | | GAGATCACTCACCCATCGCATACCTCAGGGCAGATCAAT |
| | | TCCGCACAGACCTCTAACTCTGAGCTGCCTC |
| | | CAAAGCCAGCTGCAGTGGTGAGTGAGGCCTGTGATGCTG |
| | | ATGATGCTGATAATGCCAGTAAACTAGCTGC |
| | | AATGCTAAATACCTGTTCCTTTCAGAAACCAGAACAACT |
| | | ACAACAACAAAAATCAGTTTTTGAGATATGC |
| | | CCATCTCCTGCAGAAAATAACATCCAGGGAACCACAAAG |
| | | CTAGCGTCTGGTGAAGAATTCTGTTCAGGTT |
| | | CCAGCAGCAATTTGCAAGCTCCTGGTGGCAGCTCTGAAC |
| | | GGTATTTAAAACAAAATGAAATGAATGGTGC |
| | | TTACTTCAAGCAAAGCTCAGTGTTCACTAAGGATTCCTTT |
| | | TCTGCCACTACCACACCACCACCACCATCA |
| | | CAATTGCTTCTTTCTCCCCCTCCTCCTCTTCCACAGGTTCC |
| | | TCAGCTTCCTTCAGAAGGAAAAAGCACTC |
| | | TGAATGGTGGAGTTTTAGAAGAACACCACCACTACCCCA |
| | | ACCAAAGTAACACAACACTTTTAAGGGAAGT |
| | | GAAAATAGAGGGTAAACCTGAGGCACCACCTTCCCAGA |
| | | GTCCTAATCCATCTACACATGTATGCAGCCCT |
| | | TCTCCGATGCTTTCTGAAAGGCCTCAGAATAATTGTGTG |
| | | AACAGGAATGACATACAGACTGCAGGGACAA |
| | | TGACTGTTCCATTGTGTTCTGAGAAAACAAGACCAATGT |
| | | CAGAACACCTCAAGCATAACCCACCAATTTT |
| | | TGGTAGCAGTGGAGAGCTACAGGACAACTGCCAGCAGTT |
| | | GATGAGAAACAAAGAGCAAGAGATTCTGAAG |
| | | GGTCGAGACAAGGAGCAAACACGAGATCTTGTGCCCCC |
| | | AACACAGCACTATCTGAAACCAGGATGGATTG |
| | | AATTGAAGGCCCCTCGTTTTCACCAAGCGGAATCCCATC |
| | | TAAAACGTAATGAGGCATCACTGCCATCAAT |
| | | TCTTCAGTATCAACCCAATCTCTCCAATCAAATGACCTCC |
| | | AAACAATACACTGGAAATTCCAACATGCCT |
| | | GGGGGGCTCCCAAGGCAAGCTTACACCCAGAAAACAAC |
| | | ACAGCTGGAGCACAAGTCACAAATGTACCAAG |
| | | TTGAAATGAATCAAGGGCAGTCCCAAGGTACAGTGGACC |
| | | AACATCTCCAGTTCCAAAAACCCTCACACCA |
| | | GGTGCACTTCTCCAAAACAGACCATTTACCAAAAGCTCA |
| | | TGTGCAGTCACTGTGTGGCACTAGATTTCAT |
| | | TTTCAACAAAGAGCAGATTCCCAAACTGAAAAACTTATG |
| | | TCCCCAGTGTTGAAACAGCACTTGAATCAAC |
| | | AGGCTTCAGAGACTGAGCCATTTTCAAACTCACACCTTTT |
| | | GCAACATAAGCCTCATAAACAGGCAGCACA |
| | | AACACAACCATCCCAGAGTTCACATCTCCCTCAAAACCA |
| | | GCAACAGCAGCAAAAATTACAAATAAAGAAT |
| | | AAAGAGGAAATACTCCAGACTTTTCCTCACCCCCAAAGC |
| | | AACAATGATCAGCAAAGAGAAGGATCATTCT |
| | | TTGGCCAGACTAAAGTGGAAGAATGTTTTCATGGTGAAA |
| | | ATCAGTATTCAAAATCAAGCGAGTTCGAGAC |
| | | TCATAATGTCCAAATGGGACTGGAGGAAGTACAGAATAT |
| | | AAATCGTAGAAATTCCCCTTATAGTCAGACC |
| | | ATGAAATCAAGTGCATGCAAAATACAGGTTTCTTGTTCA |
| | | AACAATACACACCTAGTTTCAGAGAATAAAG |
| | | AACAGACTACACATCCTGAACTTTTTGCAGGAAACAAGA |
| | | CCCAAAACTTGCATCACATGCAATATTTTCC |
| | | AAATAATGTGATCCCAAAGCAAGATCTTCTTCACAGGTG |
| | | CTTTCAAGAACAGGAGCAGAAGTCACAACAA |
| | | GCTTCAGTTCTACAGGGATATAAAAATAGAAACCAAGAT |
| | | ATGTCTGGTCAACAAGCTGCGCAACTTGCTC |
| | | AGCAAAGGTACTTGATACATAACCATGCAAATGTTTTTC |
| | | CTGTGCCTGACCAGGGAGGAAGTCACACTCA |
| | | GACCCCTCCCCAGAAGGACACTCAAAAGCATGCTGCTCT |
| | | AAGGTGGCATCTCTTACAGAAGCAAGAACAG |
| | | CAGCAAACACAGCAACCCCAAACTGAGTCTTGCCATAGT |
| | | CAGATGCACAGGCCAATTAAGGTGGAACCTG |
| | | GATGCAAGCCACATGCCTGTATGCACACAGCACCACCAG |
| | | AAAACAAAACATGGAAAAAGGTAACTAAGCA |
| | | AGAGAATCCACCTGCAAGCTGTGATAATGTGCAGCAAAA |
| | | GAGCATCATTGAGACCATGGAGCAGCATCTG |
| | | AAGCAGTTTCACGCCAAGTCGTTATTTGACCATAAGGCT |
| | | CTTACTCTCAAATCACAGAAGCAAGTAAAAG |
| | | TTGAAATGTCAGGGCCAGTCACAGTTTTGACTAGACAAA |
| | | CCACTGCTGCAGAACTTGATAGCCACACCCC |
| | | AGCTTTAGAGCAGCAAACAACTTCTTCAGAAAAGACACC |
| | | AACCAAAAGAACAGCTGCTTCTGTTCTCAAT |
| | | AATTTTATAGAGTCACCTTCCAAATTACTAGATACTCCTA |
| | | TAAAAAATTTATTGGATACACCTGTCAAGA |
| | | CTCAATATGATTTCCCATCTTGCAGATGTGTAGGTAAGTG |
| | | CCAGAAATGTACTGAGACACATGGCGTTTA |
| | | TCCAGAATTAGCAAATTTATCTTCAGATATGGGATTTTCC |
| | | TTCTTTTTTTAAATCTTGAGTCTGGCAGCA |
| | | ATTTGTAAAGGCTCATAAAAATCTGAAGCTTACATTTTTT |
| | | GTCAAGTTACCGATGCTTGTGTCTTGTGAA |
| | | AGAGAACTTCACTTACATGCAGTTTTTCCAAAAGAATTA |
| | | AATAATCGTGCATGTTTATTTTTCCCTCTCT |
| | | TCAGATCCTGTAAAATTTGAATGTATCTGTTTTAGATCAA |
| | | TTCGCCTATTTAGCTCTTTGTATATTATCT |
| | | CCTGGAGAGACAGCTAGGCAGCAAAAAAACAATCTATT |
| | | AAAATGAGAAAATAACGACCATAGGCAGTCTA |
| | | ATGTACGAACTTTAAATATTTTTTAATTCAAGGTAAAATA |
| | | TATTAGTTTCACAAGATTTCTGGCTAATAG |
| | | GGAAATTATTATCTTCAGTCTTCATGAGTTGGGGGAAAT |
| | | GATAATGCTGACACTCTTAGTGCTCCTAAAG |
| | | TTTCCTTTTCTCCATTTATACATTTGGAATGTTGTGATTTA |
| | | TATTCATTTTGATTCCCTTTTCTCTAAAA |
| | | TTTCATCTTTTTGATTAAAAAATATGATACAGGCATACCT |
| | | CAGAGATATTGTGGGTTTGGCTCCATACCA |
| | | CAATAAAATGAATATTACAATAAAGCAAGTTGTAAGGAC |
| | | TTTTTGGTTTCTCACTGTATGTAAAAGTTAT |
| | | TTATATACTATACTGTAACATACTAAGTGTGCAATAGCA |
| | | TTGTGTCTAAAAAATATATACTTTAAAAATA |
| | | ATTTATTGTTAAAAAAATGCCAACAATTATCTGGGCCTTT |
| | | AGTGAGTGCTAATCTTTTTGCTGGTGGAGG |
| | | GTCGTGCTTCAGTATTGATCGCTGTGGACTGATCATGGTG |
| | | GTAGTTGCTGAAGGTTGCTGGGATGGCTGT |
| | | GTGTGTGGCAATTTCTTAAAATAAGACAACAGTGAAGTG |
| | | CTGTATCAATTGATTTTTCCATTCACAAAAG |
| | | ATTTCTCTGTAGCATGCAATGCTGTTTGATAGCATTTAAC |
| | | CCACAGCAGAATTTCTTTGAAAATTGGACT |
| | | CAGTCCTCTCAAACTGTGCTGCTGCTTTATCAACTAAGTT |
| | | TTTGTAATTTTCTGAATCCTTTGTTGTCAT |
| | | TTCAGCAGTTTACAGCATCTTCATTGGAAGTATATTCCAT |
| | | CTCAAACATTCTTTGTTCATCCATAAGAAG |
| | | CAACTTCTTATCAAGTTTTTTCATGACATTGCAGTAACTC |
| | | AGCCCCATCTTCAGGCTCTACTTCTAATTC |
| | | TGGTTCTCTTGCTACATCTCCCTCATCTGCAGTGACCTCT |
| | | CCACGGAAGTCTTGAACTCCTCAAAGTAAT |
| | | CCATGAGGGTTGGAATCAACTTCTAAACTCCTGTTAATG |
| | | TTGATATATTGACCCCCTCCCATGAATTATG |
| | | AATGTTCTTAATAACTTCTAAATGGTGATACCTTTCCAGA |
| | | AGGCTTTCAATGTACTTTGCCCGGATCCAT |
| | | CAGAAGACTATCTTGGCAGCTGTAGACTAACAATATATT |
| | | TCTTAAATGATAAGACTTGAAAGTCAAAAGT |
| | | ACTCCTTAATCCATAGGCTGCAGAATCAATGTTGTATTA |
| | | ACAGGCACGAAAACAGCATTAATCTTGTGCA |
| | | TCTCCATCGGAGCTCTTGGGTGACTAGGTGCCTTGAGCA |
| | | GTAATATTTTGAAAGGAGGTTTTGGTTTTGT |
| | | TTTTTGTTTTTTTTTTTTGTTTTTTAGCAGTAAGTCTCAAC |
| | | ACTGGGCTTAAAATATTCAGTAAACTATG |
| | | TTGTAAAAAGATGTGTTATCATCCAGACTTTGTTGTTCCA |
| | | TTACTCTACACAAGCAGGGTACACTTAGCA |
| | | TAATTCTTAAGGGCCTTGGAATTTTCAGAATGGTAAATG |
| | | AGTATGGGCTTCAACTTAAAATCATCAACTG |
| | | CATTAGCCTGTAACAAGAGAGTCAGCCTGTCCTTTGAAG |
| | | CAAGGCATTGACTTCTATCTATGAAAGTCTT |
| | | AGATGGCACCTTGTTTCAATAGTAGGCTGTTTAGTACAG |
| | | CCACCTTCATCAGTGATCTTAGCTAGATCTT |
| | | CTGCATAACTTGCTGCAGCTTCTACATCAGCACTTGCTGC |
| | | CTCACCTTGTCCTTTTATGTTATAGAGACA |
| | | GCTGCGCTTCTTAAACTTTATAAACCAACTTCTGCTAGCT |
| | | TCCAACTTCTCTTCTGCAGCTTCCTCATTC |
| | | TCTTCATAGAACTGAAGGGAGTCAAGGCCTTGCTCTGGA |
| | | TTAAGCTTTGGCTTAAGGAATGTTGTGGCTG |
| | | ACGTGATCTTCTATCCAGACCACTAAAGCGCTCTCCATAT |
| | | CAGCAATAAGGCCGTTTTGCTTTCTTACCT |
| | | TTCATGTGTTCACTGGAGTAATTTCCTTCAAGAATTTTTC |
| | | CTTTACATTCACAACTTGGCTAACTGGCAT |
| | | GCAAGGCCTAGCTTTCAGCCTGTCTTGGCTTTTGACATGC |
| | | CTTCCTCACTTAGCTCGTCATATCTAGCTT |
| | | TTGATTTAAAGTGGCAGGCATACAACTCTTCCTTTCACTT |
| | | GAACACTTAGAGGCCACTGTAGGGTTATTA |
| | | ATTGGCCTAATTTCAATATTGTTGTGTTTTAGGGAATAGA |
| | | GAGGCCCAGGGAGAGGGAGAGAGCCCAAAC |
| | | GGCTGGTTGATAGAGCAGGCAGAATGCACACAACATTTA |
| | | TCAGATTATGTTTGCACCATTTACCAGATTA |
| | | TGGGTACGGTTTGTGGCACCCCCCAAAAATTAGAATAGT |
| | | AACATCAAAGATCACTGATCACAGATCGCCA |
| | | TAACATAAATAATAATAAACTTTAAAATACTGTGAGAAT |
| | | TACCAAAATGTGATACAGAGACATGAAGTGA |
| | | GCACATGCTGTTGAAAAAAATGACACTGATAGACATACT |
| | | TAACACGTGGGATTGCCACAAACCTTCAGTT |
| | | TGTAAAAGTCACAGTAACTGTGACTCACAAAAGAACAA |
| | | AGCACAATAAAACGAGGTATGCCTGTATTTTT |
| | | AAAAAAAGCTTTTTGTTAAAATTCAGGATATGTAATAGG |
| | | TCTGTAGGAATAGTGAAATATTTTTGCTGAT |
| | | GGATGTAGATATATACGTGGATAGAGATGAAGATCTTAA |
| | | TTATAGCTATGCAGCATAGATTTAGTCAAAG |
| | | ACATTTGAAAAGACAAATGTTAAATTAGTGTGGCTAATG |
| | | ACCTACCCGTGCCATGTTTTCCCTCTTGCAA |
| | | TGAGATACCCCACACTGTGTAGAAGGATGGAGGGAGGA |
| | | CTCCTACTGTCCCTCTTTGCGTGTGGTTATTA |
| | | AGTTGCCTCACTGGGCTAAAACACCACACATCTCATAGA |
| | | TAATATTTGGTAAGTTGTAATCGTCTTCACT |
| | | CTTCTCTTATCACCCACCCCTATCTTCCCACTTTTCCATCT |
| | | TTGTTGGTTTGCAACAGCCCCTTCTTTTT |
| | | GCCTGACTCTCCAGGATTTTCTCTCATCATAAATTGTTCT |
| | | AAAGTACATACTAATATGGGTCTGGATTGA |
| | | CTATTCTTATTTGCAAAACAGCAATTAAATGTTATAGGG |
| | | AAGTAGGAAGAAAAAGGGGTATCCTTGACAA |
| | | TAAACCAAGCAATATTCTGGGGGTGGGATAGAGCAGGA |
| | | AATTTTATTTTTAATCTTTTAAAATCCAAGTA |
| | | ATAGGTAGGCTTCCAGTTAGCTTTAAATGTTTTTTTTTTC |
| | | CAGCTCAAAAAATTGGATTGTAGTTGATAC |
| | | TACATATAATACATTCTAATTCCCTCACTGTATTCTTTGT |
| | | TTAGTTTCATTTATTTGGTTTAAAATAATT |
| | | TTTTATCCCATATCTGAAATGTAATATATTTTTATCCAAC |
| | | AACCAGCATGTACATATACTTAATTATGTG |
| | | GCACATTTTCTAATAGATCAGTCCATCAATCTACTCATTT |
| | | TAAAGAAAAAAAAATTTTAAAGTCACTTTT |
| | | AGAGCCCTTAATGTGTAGTTGGGGGTTAAGCTTTGTGGA |
| | | TGTAGCCTTTATATTTAGTATAATTGAGGTC |
| | | TAAAATAATAATCTTCTATTATCTCAACAGAGCAAATTA |
| | | TTGAAAAAGATGAAGGTCCTTTTTATACCCA |
| | | TCTAGGAGCAGGTCCTAATGTGGCAGCTATTAGAGAAAT |
| | | CATGGAAGAAAGGTAATTAACGCAAAGGCAC |
| | | AGGGCAGATTAACGTTTATCCTTTTGTATATGTCAGAATT |
| | | TTTCCAGCCTTCACACACAAAGCAGTAAAC |
| | | AATTGTAAATTGAGTAATTATTAGTAGGCTTAGCTATTCT |
| | | AGGGTTGCCAACACTACACACTGTGCTATT |
| | | CACCAGAGAGTCACAATATTTGACAGGACTAATAGTCTG |
| | | CTAGCTGGCACAGGCTGCCCACTTTGCGATG |
| | | GATGCCAGAAAACCCAGGCATGAACAGGAATCGGCCAG |
| | | CCAGGCTGCCAGCCACAAGGTACTGGCACAGG |
| | | CTCCAACGAGAGGTCCCACTCTGGCTTTCCCACCTGATA |
| | | ATAAAGTGTCAAAGCAGAAAGACTGGTAAAG |
| | | TGTGGTATAAGAAAAGAACCACTGAATTAAATTCACCTA |
| | | GTGTTGCAAATGAGTACTTATCTCTAAGTTT |
| | | TCTTTTACCATAAAAAGAGAGCAAGTGTGATATGTTGAA |
| | | TAGAAAGAGAAACATACTATTTACAGCTGCC |
| | | TTTTTTTTTTTTTTTCGCTATCAATCACAGGTATACAAGTA |
| | | CTTGCCTTTACTCCTGCATGTAGAAGACT |
| | | CTTATGAGCGAGATAATGCAGAGAAGGCCTTTCATATAA |
| | | ATTTATACAGCTCTGAGCTGTTCTTCTTCTA |
| | | GGGTGCCTTTTCATTAAGAGGTAGGCAGTATTATTATTA |
| | | AAGTACTTAGGATACATTGGGGCAGCTAGGA |
| | | CATATTCAGTATCATTCTTGCTCCATTTCCAAATTATTCA |
| | | TTTCTAAATTAGCATGTAGAAGTTCACTAA |
| | | ATAATCATCTAGTGGCCTGGCAGAAATAGTGAATTTCCC |
| | | TAAGTGCCTTTTTTTTGTTGTTTTTTTGTTT |
| | | TGTTTTTTAAACAAGCAGTAGGTGGTGCTTTGGTCATAA |
| | | GGGAAGATATAGTCTATTTCTAGGACTATTC |
| | | CATATTTTCCATGTGGCTGGATACTAACTATTTGCCAGCC |
| | | TCCTTTTCTAAATTGTGAGACATTCTTGGA |
| | | GGAACAGTTCTAACTAAAATCTATTATGACTCCCCAAGT |
| | | TTTAAAATAGCTAAATTTAGTAAGGGAAAAA |
| | | ATAGTTTATGTTTTAGAAGACTGAACTTAGCAAACTAAC |
| | | CTGAATTTTGTGCTTTGTGAAATTTTATATC |
| | | GAAATGAGCTTTCCCATTTTCACCCACATGTAATTTACAA |
| | | AATAGTTCATTACAATTATCTGTACATTTT |
| | | GATATTGAGGAAAAACAAGGCTTAAAAACCATTATCCAG |
| | | TTTGCTTGGCGTAGACCTGTTTAAAAAATAA |
| | | TAAACCGTTCATTTCTCAGGATGTGGTCATAGAATAAAG |
| | | TTATGCTCAAATGTTCAAATATTTAAA |
| PREDICTED: | XM_011532044.1 | TCAGGCTCTACTTCTAATTCTGGTTCTCTTGCTACATCTC |
| Homo sapiens | | CCTCATCTGCAGTGACCTCTCCACGGAAGT |
| tet | | CTTGAACTCCTCAAAAGCAAATTATTGAAAAAGATGAAG |
| methylcytosine | | GTCCTTTTTATACCCATCTAGGAGCAGGTCC |
| dioxygenase 2 | | TAATGTGGCAGCTATTAGAGAAATCATGGAAGAAAGGTT |
| (TET2), | | TGGACAGAAGGGTAAAGCTATTAGGATTGAA |
| transcript | | AGAGTCATCTATACTGGTAAAGAAGGCAAAAGTTCTCAG |
| variant X9, | | GGATGTCCTATTGCTAAGTGGGTGGTTCGCA |
| mRNA | | GAAGCAGCAGTGAAGAGAAGCTACTGTGTTTGGTGCGG |
| [SEQ ID NO: | | GAGCGAGCTGGCCACACCTGTGAGGCTGCAGT |
| 955] | | GATTGTGATTCTCATCCTGGTGTGGGAAGGAATCCCGCT |
| | | GTCTCTGGCTGACAAACTCTACTCGGAGCTT |
| | | ACCGAGACGCTGAGGAAATACGGCACGCTCACCAATCG |
| | | CCGGTGTGCCTTGAATGAAGAGAGAACTTGCG |
| | | CCTGTCAGGGGCTGGATCCAGAAACCTGTGGTGCCTCCT |
| | | TCTCTTTTGGTTGTTCATGGAGCATGTACTA |
| | | CAATGGATGTAAGTTTGCCAGAAGCAAGATCCCAAGGA |
| | | AGTTTAAGCTGCTTGGGGATGACCCAAAAGAG |
| | | GAAGAGAAACTGGAGTCTCATTTGCAAAACCTGTCCACT |
| | | CTTATGGCACCAACATATAAGAAACTTGCAC |
| | | CTGATGCATATAATAATCAGATTGAATATGAACACAGAG |
| | | CACCAGAGTGCCGTCTGGGTCTGAAGGAAGG |
| | | CCGTCCATTCTCAGGGGTCACTGCATGTTTGGACTTCTGT |
| | | GCTCATGCCCACAGAGACTTGCACAACATG |
| | | CAGAATGGCAGCACATTGGTATGCACTCTCACTAGAGAA |
| | | GACAATCGAGAATTTGGAGGAAAACCTGAGG |
| | | ATGAGCAGCTTCACGTTCTGCCTTTATACAAAGTCTCTGA |
| | | CGTGGATGAGTTTGGGAGTGTGGAAGCTCA |
| | | GGAGGAGAAAAAACGGAGTGGTGCCATTCAGGTACTGA |
| | | GTTCTTTTCGGCGAAAAGTCAGGATGTTAGCA |
| | | GAGCCAGTCAAGACTTGCCGACAAAGGAAACTAGAAGC |
| | | CAAGAAAGCTGCAGCTGAAAAGCTTTCCTCCC |
| | | TGGAGAACAGCTCAAATAAAAATGAAAAGGAAAAGTCA |
| | | GCCCCATCACGTACAAAACAAACTGAAAACGC |
| | | AAGCCAGGCTAAACAGTTGGCAGAACTTTTGCGACTTTC |
| | | AGGACCAGTCATGCAGCAGTCCCAGCAGCCC |
| | | CAGCCTCTACAGAAGCAGCCACCACAGCCCCAGCAGCA |
| | | GCAGAGACCCCAGCAGCAGCAGCCACATCACC |
| | | CTCAGACAGAGTCTGTCAACTCTTATTCTGCTTCTGGATC |
| | | CACCAATCCATACATGAGACGGCCCAATCC |
| | | AGTTAGTCCTTATCCAAACTCTTCACACACTTCAGATATC |
| | | TATGGAAGCACCAGCCCTATGAACTTCTAT |
| | | TCCACCTCATCTCAAGCTGCAGGTTCATATTTGAATTCTT |
| | | CTAATCCCATGAACCCTTACCCTGGGCTTT |
| | | TGAATCAGAATACCCAATATCCATCATATCAATGCAATG |
| | | GAAACCTATCAGTGGACAACTGCTCCCCATA |
| | | TCTGGGTTCCTATTCTCCCCAGTCTCAGCCGATGGATCTG |
| | | TATAGGTATCCAAGCCAAGACCCTCTGTCT |
| | | AAGCTCAGTCTACCACCCATCCATACACTTTACCAGCCA |
| | | AGGTTTGGAAATAGCCAGAGTTTTACATCTA |
| | | AATACTTAGGTTATGGAAACCAAAATATGCAGGGAGATG |
| | | GTTTCAGCAGTTGTACCATTAGACCAAATGT |
| | | ACATCATGTAGGGAAATTGCCTCCTTATCCCACTCATGA |
| | | GATGGATGGCCACTTCATGGGAGCCACCTCT |
| | | AGATTACCACCCAATCTGAGCAATCCAAACATGGACTAT |
| | | AAAAATGGTGAACATCATTCACCTTCTCACA |
| | | TAATCCATAACTACAGTGCAGCTCCGGGCATGTTCAACA |
| | | GCTCTCTTCATGCCCTGCATCTCCAAAACAA |
| | | GGAGAATGACATGCTTTCCCACACAGCTAATGGGTTATC |
| | | AAAGATGCTTCCAGCTCTTAACCATGATAGA |
| | | ACTGCTTGTGTCCAAGGAGGCTTACACAAATTAAGTGAT |
| | | GCTAATGGTCAGGAAAAGCAGCCATTGGCAC |
| | | TAGTCCAGGGTGTGGCTTCTGGTGCAGAGGACAACGATG |
| | | AGGTCTGGTCAGACAGCGAGCAGAGCTTTCT |
| | | GGATCCTGACATTGGGGGAGTGGCCGTGGCTCCAACTCA |
| | | TGGGTCAATTCTCATTGAGTGTGCAAAGCGT |
| | | GAGCTGCATGCCACAACCCCTTTAAAGAATCCCAATAGG |
| | | AATCACCCCACCAGGATCTCCCTCGTCTTTT |
| | | ACCAGCATAAGAGCATGAATGAGCCAAAACATGGCTTG |
| | | GCTCTTTGGGAAGCCAAAATGGCTGAAAAAGC |
| | | CCGTGAGAAAGAGGAAGAGTGTGAAAAGTATGGCCCAG |
| | | ACTATGTGCCTCAGAAATCCCATGGCAAAAAA |
| | | GTGAAACGGGAGCCTGCTGAGCCACATGAAACTTCAGA |
| | | GCCCACTTACCTGCGTTTCATCAAGTCTCTTG |
| | | CCGAAAGGACCATGTCCGTGACCACAGACTCCACAGTAA |
| | | CTACATCTCCATATGCCTTCACTCGGGTCAC |
| | | AGGGCCTTACAACAGATATATATGATATCACCCCCTTTT |
| | | GTTGGTTACCTCACTTGAAAAGACCACAACC |
| | | AACCTGTCAGTAGTATAGTTCTCATGACGTGGGCAGTGG |
| | | GGAAAGGTCACAGTATTCATGACAAATGTGG |
| | | TGGGAAAAACCTCAGCTCACCAGCAACAAAAGAGGTTA |
| | | TCTTACCATAGCACTTAATTTTCACTGGCTCC |
| | | CAAGTGGTCACAGATGGCATCTAGGAAAAGACCAAAGC |
| | | ATTCTATGCAAAAAGAAGGTGGGGAAGAAAGT |
| | | GTTCCGCAATTTACATTTTTAAACACTGGTTCTATTATTG |
| | | GACGAGATGATATGTAAATGTGATCCCCCC |
| | | CCCCCGCTTACAACTCTACACATCTGTGACCACTTTTAAT |
| | | AATATCAAGTTTGCATAGTCATGGAACACA |
| | | AATCAAACAAGTACTGTAGTATTACAGTGACAGGAATCT |
| | | TAAAATACCATCTGGTGCTGAATATATGATG |
| | | TACTGAAATACTGGAATTATGGCTTTTTGAAATGCAGTTT |
| | | TTACTGTAATCTTAACTTTTATTTATCAAA |
| | | ATAGCTACAGGAAACATGAATAGCAGGAAAACACTGAA |
| | | TTTGTTTGGATGTTCTAAGAAATGGTGCTAAG |
| | | AAAATGGTGTCTTTAATAGCTAAAAATTTAATGCCTTTAT |
| | | ATCATCAAGATGCTATCAGTGTACTCCAGT |
| | | GCCCTTGAATAATAGGGGTACCTTTTCATTCAAGTTTTTA |
| | | TCATAATTACCTATTCTTACACAAGCTTAG |
| | | TTTTTAAAATGTGGACATTTTAAAGGCCTCTGGATTTTGC |
| | | TCATCCAGTGAAGTCCTTGTAGGACAATAA |
| | | ACGTATATATGTACATATATACACAAACATGTATATGTG |
| | | CACACACATGTATATGTATAAATATTTTAAA |
| | | TGGTGTTTTAGAAGCACTTTGTCTACCTAAGCTTTGACAA |
| | | CTTGAACAATGCTAAGGTACTGAGATGTTT |
| | | AAAAAACAAGTTTACTTTCATTTTAGAATGCAAAGTTGA |
| | | TTTTTTTAAGGAAACAAAGAAAGCTTTTAAA |
| | | ATATTTTTGCTTTTAGCCATGCATCTGCTGATGAGCAATT |
| | | GTGTCCATTTTTAACACAGCCAGTTAAATC |
| | | CACCATGGGGCTTACTGGATTCAAGGGAATACGTTAGTC |
| | | CACAAAACATGTTTTCTGGTGCTCATCTCAC |
| | | ATGCTATACTGTAAAACAGTTTTATACAAAATTGTATGA |
| | | CAAGTTCATTGCTCAAAAATGTACAGTTTTA |
| | | AGAATTTTCTATTAACTGCAGGTAATAATTAGCTGCATG |
| | | CTGCAGACTCAACAAAGCTAGTTCACTGAAG |
| | | CCTATGCTATTTTATGGATCATAGGCTCTTCAGAGAACTG |
| | | AATGGCAGTCTGCCTTTGTGTTGATAATTA |
| | | TGTACATTGTGACGTTGTCATTTCTTAGCTTAAGTGTCCT |
| | | CTTTAACAAGAGGATTGAGCAGACTGATGC |
| | | CTGCATAAGATGAATAAACAGGGTTAGTTCCATGTGAAT |
| | | CTGTCAGTTAAAAAGAAACAAAAACAGGCAG |
| | | CTGGTTTGCTGTGGTGGTTTTAAATCATTAATTTGTATAA |
| | | AGAAGTGAAAGAGTTGTATAGTAAATTAAA |
| | | TTGTAAACAAAACTTTTTTAATGCAATGCTTTAGTATTTT |
| | | AGTACTGTAAAAAAATTAAATATATACATA |
| | | TATATATATATATATATATATATATATATGAGTTTGAAGC |
| | | AGAATTCACATCATGATGGTGCTACTCAGC |
| | | CTGCTACAAATATATCATAATGTGAGCTAAGAATTCATT |
| | | AAATGTTTGAGTGATGTTCCTACTTGTCATA |
| | | TACCTCAACACTAGTTTGGCAATAGGATATTGAACTGAG |
| | | AGTGAAAGCATTGTGTACCATCATTTTTTTC |
| | | CAAGTCCTTTTTTTTATTGTTAAAAAAAAAAGCATACCTT |
| | | TTTTCAATACTTGATTTCTTAGCAAGTATA |
| | | ACTTGAACTTCAACCTTTTTGTTCTAAAAATTCAGGGATA |
| | | TTTCAGCTCATGCTCTCCCTATGCCAACAT |
| | | GTCACCTGTGTTTATGTAAAATTGTTGTAGGTTAATAAAT |
| | | ATATTCTTTGTCAGGGATTTAACCCTTTTA |
| | | TTTTGAATCCCTTCTATTTTACTTGTACATGTGCTGATGT |
| | | AACTAAAACTAATTTTGTAAATCTGTTGGC |
| | | TCTTTTTATTGTAAAGAAAAGCATTTTAAAAGTTTGAGG |
| | | AATCTTTTGACTGTTTCAAGCAGGAAAAAAA |
| | | AATTACATGAAAATAGAATGCACTGAGTTGATAAAGGG |
| | | AAAAATTGTAAGGCAGGAGTTTGGCAAGTGGC |
| | | TGTTGGCCAGAGACTTACTTGTAACTCTCTAAATGAAGTT |
| | | TTTTTGATCCTGTAATCACTGAAGGTACAT |
| | | ACTCCATGTGGACTTCCCTTAAACAGGCAAACACCTACA |
| | | GGTATGGTGTGCAACAGATTGTACAATTACA |
| | | TTTTGGCCTAAATACATTTTTGCTTACTAGTATTTAAAAT |
| | | AAATTCTTAATCAGAGGAGGCCTTTGGGTT |
| | | TTATTGGTCAAATCTTTGTAAGCTGGCTTTTGTCTTTTTA |
| | | AAAAATTTCTTGAATTTGTGGTTGTGTCCA |
| | | ATTTGCAAACATTTCCAAAAATGTTTGCTTTGCTTACAAA |
| | | CCACATGATTTTAATGTTTTTTGTATACCA |
| | | TAATATCTAGCCCCAAACATTTGATTACTACATGTGCATT |
| | | GGTGATTTTGATCATCCATTCTTAATATTT |
| | | GATTTCTGTGTCACCTACTGTCATTTGTTAAACTGCTGGC |
| | | CAACAAGAACAGGAAGTATAGTTTGGGGGG |
| | | TTGGGGAGAGTTTACATAAGGAAGAGAAGAAATTGAGT |
| | | GGCATATTGTAAATATCAGATCTATAATTGTA |
| | | AATATAAAACCTGCCTCAGTTAGAATGAATGGAAAGCAG |
| | | ATCTACAATTTGCTAATATAGGAATATCAGG |
| | | TTGACTATATAGCCATACTTGAAAATGCTTCTGAGTGGT |
| | | GTCAACTTTACTTGAATGAATTTTTCATCTT |
| | | GATTGACGCACAGTGATGTACAGTTCACTTCTGAAGCTA |
| | | GTGGTTAACTTGTGTAGGAAACTTTTGCAGT |
| | | TTGACACTAAGATAACTTCTGTGTGCATTTTTCTATGCTT |
| | | TTTTAAAAACTAGTTTCATTTCATTTTCAT |
| | | GAGATGTTTGGTTTATAAGATCTGAGGATGGTTATAAAT |
| | | ACTGTAAGTATTGTAATGTTATGAATGCAGG |
| | | TTATTTGAAAGCTGTTTATTATTATATCATTCCTGATAAT |
| | | GCTATGTGAGTGTTTTTAATAAAATTTATA |
| | | TTTATTTAATGCACTCTAA |
| PREDICTED: | XM_011532043.1 | GTAGAGAAGCAGAAGGAAGCAAGATGGCTGCCCTTTAG |
| Homo sapiens | | GATTTGTTAGAAAGGAGACCCGACTGCAACTG |
| tet | | CTGGATTGCTGCAAGGCTGAGGGACGAGAACGAGGCTG |
| methylcytosine | | GCAAACATTCAGCAGCACACCCTCTCAAGATT |
| dioxygenase 2 | | GTTTACTTGCCTTTGCTCCTGTTGAGTTACAACGCTTGGA |
| (TET2), | | AGCAGGAGATGGGCTCAGCAGCAGCCAATA |
| transcript | | GGACATGATCCAGGAAGAGCAGTAAGGGACTGAGCTGC |
| variant X7, | | TGAATTCAACTAGAGGGCAGCCTTGTGGATGG |
| mRNA | | CCCCGAAGCAAGCCTGATGGAACAGGATAGAACCAACC |
| [SEQ ID NO: | | ATGTTGAGGGCAACAGACTAAGTCCATTCCTG |
| 956] | | ATACCATCACCTCCCATTTGCCAGACAGAACCTCTGGCT |
| | | ACAAAGCTCCAGAATGGAAGCCCACTGCCTG |
| | | AGAGAGCTCATCCAGAAGTAAATGGAGACACCAAGTGG |
| | | CACTCTTTCAAAAGTTATTATGGAATACCCTG |
| | | TATGAAGGGAAGCCAGAATAGTCGTGTGAGTCCTGACTT |
| | | TACACAAGAAAGTAGAGGGTATTCCAAGTGT |
| | | TTGCAAAATGGAGGAATAAAACGCACAGTTAGTGAACCT |
| | | TCTCTCTCTGGGCTCCTTCAGATCAAGAAAT |
| | | TGAAACAAGACCAAAAGGCTAATGGAGAAAGACGTAAC |
| | | TTCGGGGTAAGCCAAGAAAGAAATCCAGGTGA |
| | | AAGCAGTCAACCAAATGTCTCCGATTTGAGTGATAAGAA |
| | | AGAATCTGTGAGTTCTGTAGCCCAAGAAAAT |
| | | GCAGTTAAAGATTTCACCAGTTTTTCAACACATAACTGC |
| | | AGTGGGCCTGAAAATCCAGAGCTTCAGATTC |
| | | TGAATGAGCAGGAGGGGAAAAGTGCTAATTACCATGAC |
| | | AAGAACATTGTATTACTTAAAAACAAGGCAGT |
| | | GCTAATGCCTAATGGTGCTACAGTTTCTGCCTCTTCCGTG |
| | | GAACACACACATGGTGAACTCCTGGAAAAA |
| | | ACACTGTCTCAATATTATCCAGATTGTGTTTCCATTGCGG |
| | | TGCAGAAAACCACATCTCACATAAATGCCA |
| | | TTAACAGTCAGGCTACTAATGAGTTGTCCTGTGAGATCA |
| | | CTCACCCATCGCATACCTCAGGGCAGATCAA |
| | | TTCCGCACAGACCTCTAACTCTGAGCTGCCTCCAAAGCC |
| | | AGCTGCAGTGGTGAGTGAGGCCTGTGATGCT |
| | | GATGATGCTGATAATGCCAGTAAACTAGCTGCAATGCTA |
| | | AATACCTGTTCCTTTCAGAAACCAGAACAAC |
| | | TACAACAACAAAAATCAGTTTTTGAGATATGCCCATCTC |
| | | CTGCAGAAAATAACATCCAGGGAACCACAAA |
| | | GCTAGCGTCTGGTGAAGAATTCTGTTCAGGTTCCAGCAG |
| | | CAATTTGCAAGCTCCTGGTGGCAGCTCTGAA |
| | | CGGTATTTAAAACAAAATGAAATGAATGGTGCTTACTTC |
| | | AAGCAAAGCTCAGTGTTCACTAAGGATTCCT |
| | | TTTCTGCCACTACCACACCACCACCACCATCACAATTGCT |
| | | TCTTTCTCCCCCTCCTCCTCTTCCACAGGT |
| | | TCCTCAGCTTCCTTCAGAAGGAAAAAGCACTCTGAATGG |
| | | TGGAGTTTTAGAAGAACACCACCACTACCCC |
| | | AACCAAAGTAACACAACACTTTTAAGGGAAGTGAAAAT |
| | | AGAGGGTAAACCTGAGGCACCACCTTCCCAGA |
| | | GTCCTAATCCATCTACACATGTATGCAGCCCTTCTCCGAT |
| | | GCTTTCTGAAAGGCCTCAGAATAATTGTGT |
| | | GAACAGGAATGACATACAGACTGCAGGGACAATGACTG |
| | | TTCCATTGTGTTCTGAGAAAACAAGACCAATG |
| | | TCAGAACACCTCAAGCATAACCCACCAATTTTTGGTAGC |
| | | AGTGGAGAGCTACAGGACAACTGCCAGCAGT |
| | | TGATGAGAAACAAAGAGCAAGAGATTCTGAAGGGTCGA |
| | | GACAAGGAGCAAACACGAGATCTTGTGCCCCC |
| | | AACACAGCACTATCTGAAACCAGGATGGATTGAATTGAA |
| | | GGCCCCTCGTTTTCACCAAGCGGAATCCCAT |
| | | CTAAAACGTAATGAGGCATCACTGCCATCAATTCTTCAG |
| | | TATCAACCCAATCTCTCCAATCAAATGACCT |
| | | CCAAACAATACACTGGAAATTCCAACATGCCTGGGGGGC |
| | | TCCCAAGGCAAGCTTACACCCAGAAAACAAC |
| | | ACAGCTGGAGCACAAGTCACAAATGTACCAAGTTGAAAT |
| | | GAATCAAGGGCAGTCCCAAGGTACAGTGGAC |
| | | CAACATCTCCAGTTCCAAAAACCCTCACACCAGGTGCAC |
| | | TTCTCCAAAACAGACCATTTACCAAAAGCTC |
| | | ATGTGCAGTCACTGTGTGGCACTAGATTTCATTTTCAACA |
| | | AAGAGCAGATTCCCAAACTGAAAAACTTAT |
| | | GTCCCCAGTGTTGAAACAGCACTTGAATCAACAGGCTTC |
| | | AGAGACTGAGCCATTTTCAAACTCACACCTT |
| | | TTGCAACATAAGCCTCATAAACAGGCAGCACAAACACA |
| | | ACCATCCCAGAGTTCACATCTCCCTCAAAACC |
| | | AGCAACAGCAGCAAAAATTACAAATAAAGAATAAAGAG |
| | | GAAATACTCCAGACTTTTCCTCACCCCCAAAG |
| | | CAACAATGATCAGCAAAGAGAAGGATCATTCTTTGGCCA |
| | | GACTAAAGTGGAAGAATGTTTTCATGGTGAA |
| | | AATCAGTATTCAAAATCAAGCGAGTTCGAGACTCATAAT |
| | | GTCCAAATGGGACTGGAGGAAGTACAGAATA |
| | | TAAATCGTAGAAATTCCCCTTATAGTCAGACCATGAAAT |
| | | CAAGTGCATGCAAAATACAGGTTTCTTGTTC |
| | | AAACAATACACACCTAGTTTCAGAGAATAAAGAACAGA |
| | | CTACACATCCTGAACTTTTTGCAGGAAACAAG |
| | | ACCCAAAACTTGCATCACATGCAATATTTTCCAAATAAT |
| | | GTGATCCCAAAGCAAGATCTTCTTCACAGGT |
| | | GCTTTCAAGAACAGGAGCAGAAGTCACAACAAGCTTCA |
| | | GTTCTACAGGGATATAAAAATAGAAACCAAGA |
| | | TATGTCTGGTCAACAAGCTGCGCAACTTGCTCAGCAAAG |
| | | GTACTTGATACATAACCATGCAAATGTTTTT |
| | | CCTGTGCCTGACCAGGGAGGAAGTCACACTCAGACCCCT |
| | | CCCCAGAAGGACACTCAAAAGCATGCTGCTC |
| | | TAAGGTGGCATCTCTTACAGAAGCAAGAACAGCAGCAA |
| | | ACACAGCAACCCCAAACTGAGTCTTGCCATAG |
| | | TCAGATGCACAGGCCAATTAAGGTGGAACCTGGATGCAA |
| | | GCCACATGCCTGTATGCACACAGCACCACCA |
| | | GAAAACAAAACATGGAAAAAGGTAACTAAGCAAGAGAA |
| | | TCCACCTGCAAGCTGTGATAATGTGCAGCAAA |
| | | AGAGCATCATTGAGACCATGGAGCAGCATCTGAAGCAGT |
| | | TTCACGCCAAGTCGTTATTTGACCATAAGGC |
| | | TCTTACTCTCAAATCACAGAAGCAAGTAAAAGTTGAAAT |
| | | GTCAGGGCCAGTCACAGTTTTGACTAGACAA |
| | | ACCACTGCTGCAGAACTTGATAGCCACACCCCAGCTTTA |
| | | GAGCAGCAAACAACTTCTTCAGAAAAGACAC |
| | | CAACCAAAAGAACAGCTGCTTCTGTTCTCAATAATTTTAT |
| | | AGAGTCACCTTCCAAATTACTAGATACTCC |
| | | TATAAAAAATTTATTGGATACACCTGTCAAGACTCAATA |
| | | TGATTTCCCATCTTGCAGATGTGTAGAGCAA |
| | | ATTATTGAAAAAGATGAAGGTCCTTTTTATACCCATCTA |
| | | GGAGCAGGTCCTAATGTGGCAGCTATTAGAG |
| | | AAATCATGGAAGAAAGGTATACAAGTACTTGCCTTTACT |
| | | CCTGCATGTAGAAGACTCTTATGAGCGAGAT |
| | | AATGCAGAGAAGGCCTTTCATATAAATTTATACAGCTCT |
| | | GAGCTGTTCTTCTTCTAGGGTGCCTTTTCAT |
| | | TAAGAGGTAGGCAGTATTATTATTAAAGTACTTAGGATA |
| | | CATTGGGGCAGCTAGGACATATTCAGTATCA |
| | | TTCTTGCTCCATTTCCAAATTATTCATTTCTAAATTAGCA |
| | | TGTAGAAGTTCACTAAATAATCATCTAGTG |
| | | GCCTGGCAGAAATAGTGAATTTCCCTAAGTGCCTTTTTTT |
| | | TGTTGTTTTTTTGTTTTGTTTTTTAAACAA |
| | | GCAGTAGGTGGTGCTTTGGTCATAAGGGAAGATATAGTC |
| | | TATTTCTAGGACTATTCCATATTTTCCATGT |
| | | GGCTGGATACTAACTATTTGCCAGCCTCCTTTTCTAAATT |
| | | GTGAGACATTCTTGGAGGAACAGTTCTAAC |
| | | TAAAATCTATTATGACTCCCCAAGTTTTAAAATAGCTAA |
| | | ATTTAGTAAGGGAAAAAATAGTTTATGTTTT |
| | | AGAAGACTGAACTTAGCAAACTAACCTGAATTTTGTGCT |
| | | TTGTGAAATTTTATATCGAAATGAGCTTTCC |
| | | CATTTTCACCCACATGTAATTTACAAAATAGTTCATTACA |
| | | ATTATCTGTACATTTTGATATTGAGGAAAA |
| | | ACAAGGCTTAAAAACCATTATCCAGTTTGCTTGGCGTAG |
| | | ACCTGTTTAAAAAATAATAAACCGTTCATTT |
| | | CTCAGGATGTGGTCATAGAATAAAGTTATGCTCAAATGT |
| | | TCAAA |

[0122] The term “gene” or “gene sequence” is meant to refer to a genetic sequence, e.g., a nucleic acid sequence. The term “gene” is intended to encompass a complete gene sequence or a partial gene sequence. The term “gene” refers to a sequence that encodes a protein or polypeptide or a sequence that does not encode a protein or polypeptide, e.g., a regulatory sequence, leader sequence, signal sequence, intron, or other non-protein coding sequence.

The term “intron” refers to nucleic acid sequence within a gene which is noncoding for the protein expressed from said gene. Intronic sequence may be transcribed from DNA into RNA, but may be removed before the protein is expressed.

[0123] The term “exon” refers to nucleic acid sequence within a gene which encodes a protein expressed from said gene.

[0124] The term “intron-exon junction,” when used in connection with a gene editing system or gRNA molecule, refers to a sequence which includes nucleotides of an exon and nucleotides of an intron. In exemplary embodiments, an intron-exon junction is a gRNA target sequence, whereby, when recognized by a CRISPR system comprising a gRNA comprising a targeting domain complementary to the intron-exon junction target sequence, said CRISPR system modifies, e.g., produces a break, at or near the target sequence between two nucleotides of an intron. In other exemplary embodiments, an intron-exon junction is a gRNA target sequence, whereby, when recognized by a CRISPR system comprising a gRNA comprising a targeting domain complementary to the intron-exon junction target sequence, said CRISPR system modifies, e.g., produces a break, at or near the target sequence between two nucleotides of an exon. In other exemplary embodiments, an intron-exon junction is a gRNA target sequence, whereby, when recognized by a CRISPR system comprising a gRNA comprising a targeting domain complementary to the intron-exon junction target sequence, said CRISPR system modifies, e.g., produces a break, at or near the target sequence between a nucleotide of an exon and a nucleotide of an intron.

[0125] The term “a,” “an,” or “the” refers to one or to more than one of the grammatical object of the article. The term may mean “one,” “one or more,” “at least one,” or “one or more than one.” By way of example, “an element” means one element or more than one element. The term “or” means “and/or” unless otherwise stated. The term “including” or “containing” is not limiting.

[0126] The term “about” when referring to a measurable value such as an amount, a temporal duration, and the like, is meant to encompass variations of ±20% or in some instances ±10%, or in some instances ±5%, or in some instances ±1%, or in some instances ±0.1% from the specified value, as such variations are appropriate to perform the disclosed methods.

[0127] The term “Chimeric Antigen Receptor” or alternatively a “CAR” refers to a set of polypeptides, typically two in the simplest embodiments, which when in an immune effector cell, provides the cell with specificity for a target cell, typically a cancer cell, and with intracellular signal generation. In some embodiments, a CAR comprises at least an extracellular antigen binding domain, a transmembrane domain and a cytoplasmic signaling domain (also referred to herein as “an intracellular signaling domain”) comprising a functional signaling domain derived from a stimulatory molecule and/or costimulatory molecule as defined below. In some aspects, the set of polypeptides are contiguous with each other. In some embodiments, the set of polypeptides include a dimerization switch that, upon the presence of a dimerization molecule, can couple the polypeptides to one another, e.g., can couple an antigen binding domain to an intracellular signaling domain. In one aspect, the stimulatory molecule is the zeta chain associated with the T cell receptor complex. In one aspect, the cytoplasmic signaling domain further comprises one or more functional signaling domains derived from at least one costimulatory molecule as defined below. In one aspect, the costimulatory molecule is chosen from the costimulatory molecules described herein, e.g., 41BB (i.e., CD137), CD27 and/or CD28. In one aspect, the CAR comprises a chimeric fusion protein comprising an extracellular antigen binding domain, a transmembrane domain and an intracellular signaling domain comprising a functional signaling domain derived from a stimulatory molecule. In one aspect, the CAR comprises a chimeric fusion protein comprising an extracellular antigen binding domain, a transmembrane domain and an intracellular signaling domain comprising a functional signaling domain derived from a costimulatory molecule and a functional signaling domain derived from a stimulatory molecule. In one aspect, the CAR comprises a chimeric fusion protein comprising an extracellular antigen binding domain, a transmembrane domain and an intracellular signaling domain comprising two functional signaling domains derived from one or more costimulatory molecule(s) and a functional signaling domain derived from a stimulatory molecule. In one aspect, the CAR comprises a chimeric fusion protein comprising an extracellular antigen binding domain, a transmembrane domain and an intracellular signaling domain comprising at least two functional signaling domains derived from one or more costimulatory molecule(s) and a functional signaling domain derived from a stimulatory molecule. In one aspect the CAR comprises an optional leader sequence at the amino-terminus (N-ter) of the CAR fusion protein. In one aspect, the CAR further comprises a leader sequence at the N-terminus of the extracellular antigen binding domain, wherein the leader sequence is optionally cleaved from the antigen binding domain (e.g., a scFv) during cellular processing and localization of the CAR to the cellular membrane.

[0128] A CAR that comprises an antigen binding domain (e.g., a scFv, or TCR) that targets a specific tumor marker X, such as those described herein, is also referred to as XCAR. For example, a CAR that comprises an antigen binding domain that targets CD19 is referred to as CD19CAR. As another example, a CAR that comprises an antigen binding domain that targets BCMA is referred to as a BCMA CAR.

[0129] The term “signaling domain” refers to the functional portion derived from protein which acts by transmitting information within a cell to regulate cellular activity via defined signaling pathways, for example, by generating second messengers or functioning as effectors by responding to such messengers. In embodiments, a signaling domain refers to a variant or homolog, e.g., a functional variant or homolog, of a naturally occurring signaling domain, for example a signaling domain variant having at least about 90%, 95%, 96%, 97%, 98%, or 99% sequence identity to a naturally-occurring signaling domain.

[0130] The term “antibody,” as used herein, refers to one or more proteins or polypeptide sequence derived from an immunoglobulin molecule which specifically binds an antigen. Antibodies can be polyclonal or monoclonal, multiple or single chain, functional fragments (e.g., Fab fragments or scFv), or intact immunoglobulins, and may be derived from natural sources or from recombinant sources. Antibodies can be, e.g., dimers or tetramers of immunoglobulin molecules. Antibodies can be from any species or chimeric, including human or humanized antibodies.

[0131] The term “antibody fragment” refers to at least one portion of an antibody, that retains the ability to specifically interact with (e.g., by binding, steric hindrance, stabilizing/destabilizing, spatial distribution) an epitope of an antigen. In some embodiments, the antibody fragment retains an affinity for the epitope of an antigen broadly comparable to that of the intact immunoglobulin. For example, the antibody fragment may retain 80%, 85%, 90%, 95%, 99%, or more of the affinity seen with the intact immunoglobulin, as measured, e.g., by ELISA, Biacore, or other suitable assays. Examples of antibody fragments include, but are not limited to, Fab, Fab′, F(ab′) 2, Fv fragments, scFv antibody fragments, disulfide-linked Fvs (sdFv), a Fd fragment consisting of the VH and CH1 domains, linear antibodies, single domain antibodies such as sdAb (either VL or VH), camelid VHH domains, multi-specific antibodies formed from antibody fragments such as a bivalent fragment comprising two Fab fragments linked by a disulfide bridge at the hinge region, and an isolated CDR or other epitope binding fragments of an antibody. An antigen binding fragment can also be incorporated into single domain antibodies, maxibodies, minibodies, nanobodies, intrabodies, diabodies, triabodies, tetrabodies, v-NAR and bis-scFv (see, e.g., Hollinger and Hudson, Nature Biotechnology 23:1126-1136, 2005). Antigen binding fragments can also be grafted into scaffolds based on polypeptides such as a fibronectin type III (Fn3) (see U.S. Pat. No. 6,703,199, which describes fibronectin polypeptide minibodies).

[0132] The term “scFv” refers to a fusion protein comprising at least one antibody fragment comprising a variable region of a light chain and at least one antibody fragment comprising a variable region of a heavy chain, wherein the light and heavy chain variable regions are contiguously linked, e.g., directly or via a synthetic linker, e.g., a short flexible polypeptide linker, and capable of being expressed as a single chain polypeptide, and wherein the scFv retains the specificity of the intact antibody from which it is derived. Unless specified, as used herein an scFv may have the VL and VH variable regions in either order, e.g., with respect to the N-terminal and C-terminal ends of the polypeptide, the scFv may comprise VL-linker-VH or may comprise VH-linker-VL.

[0133] The portion of the CAR comprising an antibody or antibody fragment thereof may exist in a variety of forms where the antigen binding domain is expressed as part of a contiguous polypeptide chain including, for example, a single domain antibody fragment (sdAb), a single chain antibody (scFv), a humanized antibody or bispecific antibody (Harlow et al., 1999, In: Using Antibodies: A Laboratory Manual, Cold Spring Harbor Laboratory Press, NY; Harlow et al., 1989, In: Antibodies: A Laboratory Manual, Cold Spring Harbor, New York; Houston et al., 1988, Proc. Natl. Acad. Sci. USA 85:5879-5883; Bird et al., 1988, Science 242:423-426). In one aspect, the antigen binding domain of a CAR composition comprises an antibody fragment. In a further aspect, the CAR comprises an antibody fragment that comprises a scFv. In another aspect, the CAR comprises a full antibody including the Fc region.

[0134] The portion of the CAR comprising a full antibody may be of any type (e.g., IgG, IgE, IgM, IgD, IgA and IgY), any class (e.g., IgG 1, IgG2, IgG 3, IgG4, IgA1 and IgA2) or any subclass. In some embodiments the Fc region is an IgG type constant region. In certain embodiments the Fc region of the full antibody includes an Fc region from IgG1, IgG2, IgG3, IgG4, IgA, IgA1, IgA2, IgM, IgE, IgD, and IgY, or a fragment thereof. In some embodiments the Fc region is an IgG1. The Fc region may be a native sequence Fc region, or a variant Fc region. In one embodiment, the Fc region is a human Fc region.

[0135] The portion of the CAR comprising an antibody or antibody fragment thereof may comprise the CDR sequences of an antibody coupled with human or other antibody framework sequences. The framework sequences may be the same or different from those in a starting antibody. The precise amino acid sequence boundaries of a given CDR can be determined using any of a number of well-known schemes, including those described by Kabat et al. (1991), “Sequences of Proteins of Immunological Interest,” 5th Ed. Public Health Service, National Institutes of Health, Bethesda, MD (“Kabat” numbering scheme), Al-Lazikani et al., (1997) JMB 273,927-948 (“Chothia” numbering scheme), or a combination thereof. As used herein, the term “binding domain” or “antibody molecule” refers to a protein, e.g., an immunoglobulin chain or fragment thereof, comprising at least one immunoglobulin variable domain sequence. The term “binding domain” or “antibody molecule” encompasses antibodies and antibody fragments, as well as multispecific binding constructs. In an embodiment, an antibody molecule is a multispecific antibody molecule, e.g., it comprises a plurality of immunoglobulin variable domain sequences forming antigen-binding sites for different epitopes of antigens, when a first immunoglobulin variable domain sequence of the plurality has binding specificity for a first epitope and at least a second immunoglobulin variable domain sequence of the plurality has binding specificity for a second epitope. In an embodiment, a multispecific antibody molecule is a bispecific antibody molecule. A bispecific antibody has specificity for no more than two antigens. A bispecific antibody molecule is characterized by a first immunoglobulin variable domain sequence which has binding specificity for a first epitope and a second immunoglobulin variable domain sequence that has binding specificity for a second epitope. In other embodiments, a “binding domain” or “antibody molecule” encompasses multivalent antibody molecules, e.g., it comprises a plurality of immunoglobulin variable domain sequences forming two or more antigen binding sites for the same epitope of an antigen.

[0136] The term “antibody heavy chain,” refers to the larger of the two types of polypeptide chains present in antibody molecules in their naturally occurring conformations, and which normally determines the class to which the antibody belongs.

[0137] The term “antibody light chain,” refers to the smaller of the two types of polypeptide chains present in antibody molecules in their naturally occurring conformations. Kappa (κ) and lambda (λ) light chains refer to the two major antibody light chain isotypes.

[0138] The term “recombinant antibody” refers to an antibody which is generated using recombinant DNA technology, such as, for example, an antibody expressed by a bacteriophage or yeast expression system or in any other host cell. The term also includes an antibody which has been generated by the synthesis of a DNA molecule encoding the antibody and which DNA molecule expresses an antibody protein, or an amino acid sequence specifying the antibody, wherein the DNA or amino acid sequence has been obtained using recombinant DNA or amino acid sequence technology which is available and well known in the art.

[0139] The term “antigen” or “Ag” refers to a molecule that provokes an immune response. This immune response may involve either antibody production, or the activation of specific immunologically-competent cells, or both. The term also refers to any peptide bound by an antibody or antibody fragment thereof. The skilled artisan will understand that any macromolecule, including virtually all proteins or peptides, can serve as an antigen. Furthermore, antigens can be derived from recombinant or genomic DNA. A skilled artisan will understand that any DNA, which comprises a nucleotide sequences or a partial nucleotide sequence encoding a protein that elicits an immune response therefore encodes an “antigen” as that term is used herein. Furthermore, one skilled in the art will understand that an antigen need not be encoded solely by a full length nucleotide sequence of a gene. It is readily apparent that the present disclosure includes, but is not limited to, the use of partial nucleotide sequences of more than one gene and that these nucleotide sequences are arranged in various combinations to encode polypeptides that elicit the desired immune response. Moreover, a skilled artisan will understand that an antigen need not be encoded by a “gene” at all. It is readily apparent that an antigen can be generated synthesized or can be derived from a biological sample, or might be macromolecule besides a polypeptide. Such a biological sample can include, but is not limited to a tissue sample, a tumor sample, a cell or a fluid with other biological components.

[0140] The term “anti-cancer effect” refers to a biological effect which can be manifested by various means, including but not limited to, e.g., a decrease in tumor volume, a decrease in the number of cancer cells, a decrease in the number of metastases, an increase in life expectancy, decrease in cancer cell proliferation, decrease in cancer cell survival, or amelioration of various physiological symptoms associated with the cancerous condition. An “anti-cancer effect” can also be manifested by the ability of the peptides, polynucleotides, cells and antibodies in prevention of the occurrence of cancer in the first place. The term “anti-tumor effect” refers to a biological effect which can be manifested by various means, including but not limited to, e.g., a decrease in tumor volume, a decrease in the number of tumor cells, a decrease in tumor cell proliferation, or a decrease in tumor cell survival.

[0141] The term “autologous” refers to any material derived from the same individual into whom it is introduced.

[0142] The term “allogeneic” refers to any material derived from a different animal of the same species as the individual to whom the material is introduced. Two or more individuals are said to be allogeneic to one another when the genes at one or more loci are not identical. In some aspects, allogeneic material from individuals of the same species may be sufficiently unlike genetically to interact antigenically

[0143] The term “xenogeneic” refers to a graft derived from an animal of a different species.

[0144] The term “cancer” refers to a disease characterized by the uncontrolled growth of aberrant cells. Cancer cells can spread locally or through the bloodstream and lymphatic system to other parts of the body. Examples of various cancers are described herein and include but are not limited to, breast cancer, prostate cancer, ovarian cancer, cervical cancer, skin cancer, pancreatic cancer, colorectal cancer, renal cancer, liver cancer, brain cancer, lymphoma, leukemia, lung cancer and the like. The terms “tumor” and “cancer” are used interchangeably herein, e.g., both terms encompass solid and liquid, e.g., diffuse or circulating, tumors. As used herein, the term “cancer” or “tumor” includes premalignant, as well as malignant cancers and tumors.

[0145] “Derived from” as that term is used herein, indicates a relationship between a first and a second molecule. It generally refers to structural similarity between the first molecule and a second molecule and does not connote or include a process or source limitation on a first molecule that is derived from a second molecule. For example, in the case of an intracellular signaling domain that is derived from a CD3zeta molecule, the intracellular signaling domain retains sufficient CD3zeta structure such that is has the required function, namely, the ability to generate a signal under the appropriate conditions. It does not connote or include a limitation to a particular process of producing the intracellular signaling domain, e.g., it does not mean that, to provide the intracellular signaling domain, one must start with a CD3zeta sequence and delete unwanted sequence, or impose mutations, to arrive at the intracellular signaling domain.

[0146] The phrase “disease associated with expression of a tumor antigen as described herein” includes, but is not limited to, a disease associated with expression of a tumor antigen as described herein or condition associated with cells which express a tumor antigen as described herein including, e.g., proliferative diseases such as a cancer or malignancy or a precancerous condition such as a myelodysplasia, a myelodysplastic syndrome or a preleukemia; or a noncancer-related indication associated with cells which express a tumor antigen as described herein. In one aspect, a cancer associated with expression of a tumor antigen as described herein is a hematological cancer. In one aspect, a cancer associated with expression of a tumor antigen as described herein is a solid cancer. Further diseases associated with expression of a tumor antigen described herein include, but not limited to, e.g., atypical and/or non-classical cancers, malignancies, precancerous conditions or proliferative diseases associated with expression of a tumor antigen as described herein. Non-cancer related indications associated with expression of a tumor antigen as described herein include, but are not limited to, e.g., autoimmune disease, (e.g., lupus), inflammatory disorders (allergy and asthma) and transplantation. In some embodiments, the tumor antigen-expressing cells express, or at any time expressed, mRNA encoding the tumor antigen. In an embodiment, the tumor antigen-expressing cells produce the tumor antigen protein (e.g., wild-type or mutant), and the tumor antigen protein may be present at normal levels or reduced levels. In an embodiment, the tumor antigen-expressing cells produced detectable levels of a tumor antigen protein at one point, and subsequently produced substantially no detectable tumor antigen protein.

[0147] The term “conservative sequence modifications” refers to amino acid modifications that do not significantly affect or alter the binding characteristics of the antibody or antibody fragment containing the amino acid sequence. Such conservative modifications include amino acid substitutions, additions and deletions. Modifications can be introduced into an antibody or antibody fragment described herein by standard techniques known in the art, such as site-directed mutagenesis and PCR-mediated mutagenesis. Conservative amino acid substitutions are ones in which the amino acid residue is replaced with an amino acid residue having a similar side chain. Families of amino acid residues having similar side chains have been defined in the art. These families include amino acids with basic side chains (e.g., lysine, arginine, histidine), acidic side chains (e.g., aspartic acid, glutamic acid), uncharged polar side chains (e.g., glycine, asparagine, glutamine, serine, threonine, tyrosine, cysteine, tryptophan), nonpolar side chains (e.g., alanine, valine, leucine, isoleucine, proline, phenylalanine, methionine), beta-branched side chains (e.g., threonine, valine, isoleucine) and aromatic side chains (e.g., tyrosine, phenylalanine, tryptophan, histidine). Thus, one or more amino acid residues within a CAR of the disclosure can be replaced with other amino acid residues from the same side chain family and the altered CAR can be tested using the functional assays described herein.

[0148] The term “stimulation,” refers to a primary response induced by binding of a stimulatory molecule (e.g., a TCR/CD3 complex or CAR) with its cognate ligand (or tumor antigen in the case of a CAR) thereby mediating a signal transduction event, such as, but not limited to, signal transduction via the TCR/CD3 complex or signal transduction via the appropriate NK receptor or signaling domains of the CAR. Stimulation can mediate altered expression of certain molecules.

[0149] The term “stimulatory molecule,” refers to a molecule expressed by an immune cell (e.g., T cell, NK cell, B cell) that provides the cytoplasmic signaling sequence(s) that regulate activation of the immune cell in a stimulatory way for at least some aspect of the immune cell signaling pathway. In one aspect, the signal is a primary signal that is initiated by, for instance, binding of a TCR/CD3 complex with an MHC molecule loaded with peptide, and which leads to mediation of a T cell response, including, but not limited to, proliferation, activation, differentiation, and the like. A primary cytoplasmic signaling sequence (also referred to as a “primary signaling domain”) that acts in a stimulatory manner may contain a signaling motif which is known as immunoreceptor tyrosine-based activation motif or ITAM. Examples of an ITAM containing cytoplasmic signaling sequence that is of particular use includes, but is not limited to, those derived from CD3 zeta, common FcR gamma (FCER1G), Fc gamma RIIa, FcR beta (Fc Epsilon R1b), CD3 gamma, CD3 delta, CD3 epsilon, CD79a, CD79b, DAP10, and DAP12. In a specific CAR embodiment, the intracellular signaling domain in any one or more CARS of the disclosure comprises an intracellular signaling sequence, e.g., a primary signaling sequence of CD3-zeta. In a specific CAR of the disclosure, the primary signaling sequence of CD3-zeta is the sequence provided as SEQ ID NO:21, or the equivalent residues from a non-human species, e.g., mouse, rodent, monkey, ape and the like. In a specific CAR of the disclosure, the primary signaling sequence of CD3-zeta is the sequence as provided in SEQ ID NO: 24, or the equivalent residues from a non-human species, e.g., mouse, rodent, monkey, ape and the like.

[0150] The term “antigen presenting cell” or “APC” refers to an immune system cell such as an accessory cell (e.g., a B-cell, a dendritic cell, and the like) that displays a foreign antigen complexed with major histocompatibility complexes (MHC's) on its surface. T-cells may recognize these complexes using their T-cell receptors (TCRs). APCs process antigens and present them to T-cells.

[0151] An “intracellular signaling domain,” as the term is used herein, refers to an intracellular portion derived from a molecule, e.g., a stimulatory or costimulatory molecule. The intracellular signaling domain generates a signal that promotes an immune effector function of the CAR containing cell, e.g., a CART cell. Examples of immune effector function, e.g., in a CART cell, include cytolytic activity and helper activity, including the secretion of cytokines.

[0152] In an embodiment, the intracellular signaling domain can comprise a primary intracellular signaling domain. Exemplary primary intracellular signaling domains include those derived from the molecules responsible for primary stimulation, or antigen dependent simulation. In an embodiment, the intracellular signaling domain can comprise a costimulatory intracellular domain. Exemplary costimulatory intracellular signaling domains include those derived from molecules responsible for costimulatory signals, or antigen independent stimulation. For example, in the case of a CART, a primary intracellular signaling domain can comprise a cytoplasmic sequence of a T cell receptor, and a costimulatory intracellular signaling domain can comprise cytoplasmic sequence from co-receptor or costimulatory molecule.

[0153] A primary intracellular signaling domain can comprise a signaling motif which is known as an immunoreceptor tyrosine-based activation motif or ITAM. Examples of ITAM containing primary cytoplasmic signaling sequences include, but are not limited to, those derived from CD3 zeta, common FcR gamma (FCER1G), Fc gamma RIIa, FcR beta (Fc Epsilon R1b), CD3 gamma, CD3 delta, CD3 epsilon, CD79a, CD79b, DAP10, and DAP12.

[0154] The term “zeta” or alternatively “zeta chain”, “CD3-zeta” or “TCR-zeta” is defined as the protein provided as GenBan Acc. No. BAG36664.1, or the equivalent residues from a non-human species, e.g., mouse, rodent, monkey, ape and the like, and a “zeta stimulatory domain” or alternatively a “CD3-zeta stimulatory domain” or a “TCR-zeta stimulatory domain” is defined as the amino acid residues from the cytoplasmic domain of the zeta chain, or functional derivatives thereof, that are sufficient to functionally transmit an initial signal necessary for T cell activation. In one aspect the cytoplasmic domain of zeta comprises residues 52 through 164 of GenBank Acc. No. BAG36664.1 or the equivalent residues from a non-human species, e.g., mouse, rodent, monkey, ape and the like, that are functional orthologs thereof. In one aspect, the “zeta stimulatory domain” or a “CD3-zeta stimulatory domain” is the sequence provided as SEQ ID NO: 21. In one aspect, the “zeta stimulatory domain” or a “CD3-zeta stimulatory domain” is the sequence provided as SEQ ID NO: 24.

[0155] The term “costimulatory molecule” refers to a cognate binding partner on a T cell that specifically binds with a costimulatory ligand, thereby mediating a costimulatory response by the T cell, such as, but not limited to, proliferation. Costimulatory molecules are cell surface molecules other than antigen receptors or their ligands that are contribute to an efficient immune response. Costimulatory molecules include, but are not limited to an MHC class I molecule, BTLA and a Toll ligand receptor, as well as OX40, CD27, CD28, CDS, ICAM-1, LFA-1 (CD11a/CD18), ICOS (CD278), and 4-1BB (CD137). Further examples of such costimulatory molecules include CDS, ICAM-1, GITR, BAFFR, HVEM (LIGHTR), SLAMF7, NKp80 (KLRF1), NKp44, NKp30, NKp46, CD160, CD19, CD4, CD8alpha, CD8beta, IL2R beta, IL2R gamma, IL7R alpha, ITGA4, VLA1, CD49a, ITGA4, IA4, CD49D, ITGA6, VLA-6, CD49f, ITGAD, CD11d, ITGAE, CD103, ITGAL, CD11a, LFA-1, ITGAM, CD11b, ITGAX, CD11c, ITGB1, CD29, ITGB2, CD18, LFA-1, ITGB7, NKG2D, NKG2C, TNFR2, TRANCE/RANKL, DNAMI (CD226), SLAMF4 (CD244, 2B4), CD84, CD96 (Tactile), CEACAM1, CRTAM, Ly9 (CD229), CD160 (BY55), PSGL1, CD100 (SEMA4D), CD69, SLAMF6 (NTB-A, Ly108), SLAM (SLAMF1, CD150, IPO-3), BLAME (SLAMF8), SELPLG (CD162), LTBR, LAT, GADS, SLP-76, PAG/Cbp, CD19a, and a ligand that specifically binds with CD83.

[0156] A costimulatory intracellular signaling domain can be the intracellular portion of a costimulatory molecule. A costimulatory molecule can be represented in the following protein families: TNF receptor proteins, Immunoglobulin-like proteins, cytokine receptors, integrins, signaling lymphocytic activation molecules (SLAM proteins), and activating NK cell receptors. Examples of such molecules include CD27, CD28, 4-1BB (CD137), OX40, GITR, CD30, CD40, ICOS, BAFFR, HVEM, ICAM-1, lymphocyte function-associated antigen-1 (LFA-1), CD2, CDS, CD7, CD287, LIGHT, NKG2C, NKG2D, SLAMF7, NKp80, NKp30, NKp44, NKp46, CD160, B7-H3, and a ligand that specifically binds with CD83, and the like.

[0157] The intracellular signaling domain can comprise the entire intracellular portion, or the entire native intracellular signaling domain, of the molecule from which it is derived, or a functional fragment or derivative thereof.

[0158] The term “4-1BB” refers to a member of the TNFR superfamily with an amino acid sequence provided as GenBank Acc. No. AAA62478.2, or the equivalent residues from a non-human species, e.g., mouse, rodent, monkey, ape and the like; and a “4-1BB costimulatory domain” is defined as amino acid residues 214-255 of GenBank Acc. No. AAA62478.2, or the equivalent residues from a non-human species, e.g., mouse, rodent, monkey, ape and the like. In one aspect, the “4-1BB costimulatory domain” is the sequence provided as SEQ ID NO: 16 or the equivalent residues from a non-human species, e.g., mouse, rodent, monkey, ape and the like.

[0159] “Immune effector cell,” as that term is used herein, refers to a cell that is involved in an immune response, e.g., in the promotion of an immune effector response. Examples of immune effector cells include T cells, e.g., alpha/beta T cells and gamma/delta T cells, B cells, natural killer (NK) cells, natural killer T (NKT) cells, mast cells, and myeloic-derived phagocytes.

[0160] “Immune effector function or immune effector response,” as that term is used herein, refers to function or response, e.g., of an immune effector cell, that enhances or promotes an immune attack of a target cell. E.g., an immune effector function or response refers a property of a T or NK cell that promotes killing or the inhibition of growth or proliferation, of a target cell. In the case of a T cell, primary stimulation and co-stimulation are examples of immune effector function or response.

[0161] The term “encoding” refers to the inherent property of specific sequences of nucleotides in a polynucleotide, such as a gene, a cDNA, or an mRNA, to serve as templates for synthesis of other polymers and macromolecules in biological processes having either a defined sequence of nucleotides (e.g., rRNA, tRNA and mRNA) or a defined sequence of amino acids and the biological properties resulting therefrom. Thus, a gene, cDNA, or RNA, encodes a protein if transcription and translation of mRNA corresponding to that gene produces the protein in a cell or other biological system. Both the coding strand, the nucleotide sequence of which is identical to the mRNA sequence and is usually provided in sequence listings, and the non-coding strand, used as the template for transcription of a gene or cDNA, can be referred to as encoding the protein or other product of that gene or cDNA.

[0162] Unless otherwise specified, a “nucleotide sequence encoding an amino acid sequence” includes all nucleotide sequences that are degenerate versions of each other and that encode the same amino acid sequence. The phrase nucleotide sequence that encodes a protein or an RNA may also include introns to the extent that the nucleotide sequence encoding the protein may in some version contain an intron(s).

[0163] The term “effective amount” or “therapeutically effective amount” are used interchangeably herein, and refer to an amount of a compound, formulation, material, or composition, as described herein effective to achieve a particular biological result.

[0164] The term “endogenous” refers to any material from or produced inside an organism, cell, tissue or system.

[0165] The term “exogenous” refers to any material introduced from or produced outside an organism, cell, tissue or system.

[0166] The term “expression” refers to the transcription and/or translation of a particular nucleotide sequence driven by a promoter.

[0167] The term “transfer vector” refers to a composition of matter which comprises an isolated nucleic acid and which can be used to deliver the isolated nucleic acid to the interior of a cell. Numerous vectors are known in the art including, but not limited to, linear polynucleotides, polynucleotides associated with ionic or amphiphilic compounds, plasmids, and viruses. Thus, the term “transfer vector” includes an autonomously replicating plasmid or a virus. The term should also be construed to further include non-plasmid and non-viral compounds which facilitate transfer of nucleic acid into cells, such as, for example, a polylysine compound, liposome, and the like. Examples of viral transfer vectors include, but are not limited to, adenoviral vectors, adeno-associated virus vectors, retroviral vectors, lentiviral vectors, and the like.

[0168] The term “expression vector” refers to a vector comprising a recombinant polynucleotide comprising expression control sequences operatively linked to a nucleotide sequence to be expressed. An expression vector comprises sufficient cis-acting elements for expression; other elements for expression can be supplied by the host cell or in an in vitro expression system. Expression vectors include all those known in the art, including cosmids, plasmids (e.g., naked or contained in liposomes) and viruses (e.g., lentiviruses, retroviruses, adenoviruses, and adeno-associated viruses) that incorporate the recombinant polynucleotide.

[0169] The term “homologous” or “identity” refers to the subunit sequence identity between two polymeric molecules, e.g., between two nucleic acid molecules, such as, two DNA molecules or two RNA molecules, or between two polypeptide molecules. When a subunit position in both of the two molecules is occupied by the same monomeric subunit; e.g., if a position in each of two DNA molecules is occupied by adenine, then they are homologous or identical at that position. The homology between two sequences is a direct function of the number of matching or homologous positions; e.g., if half (e.g., five positions in a polymer ten subunits in length) of the positions in two sequences are homologous, the two sequences are 50% homologous; if 90% of the positions (e.g., 9 of 10), are matched or homologous, the two sequences are 90% homologous.

[0170] “Humanized” forms of non-human (e.g., murine) antibodies are chimeric immunoglobulins, immunoglobulin chains or fragments thereof (such as Fv, Fab, Fab′, F(ab′)2 or other antigen-binding subsequences of antibodies) which contain minimal sequence derived from non-human immunoglobulin. For the most part, humanized antibodies and antibody fragments thereof are human immunoglobulins (recipient antibody or antibody fragment) in which one or more, e.g., all six, complementary-determining regions (CDRs) of the recipient are replaced by residues from a CDR of a non-human species (donor antibody) such as mouse, rat or rabbit having the desired specificity, affinity, and capacity. In some instances, Fv framework region (FR) residues of the human immunoglobulin are replaced by corresponding non-human residues. Furthermore, a humanized antibody/antibody fragment can comprise residues which are found neither in the recipient antibody nor in the imported CDR or framework sequences as long as the same antigen specificity is retained. These modifications can further refine and optimize antibody or antibody fragment performance. In general, the humanized antibody or antibody fragment thereof will comprise substantially all of at least one, and typically two, variable domains, in which all or substantially all of the CDR regions correspond to those of a non-human immunoglobulin and all or a significant portion of the FR regions are those of a human immunoglobulin sequence. The humanized antibody or antibody fragment can also comprise at least a portion of an immunoglobulin constant region (Fc), typically that of a human immunoglobulin. For further details, see Jones et al., Nature, 321:522-525, 1986; Reichmann et al., Nature, 332:323-329, 1988; Presta, Curr. Op. Struct. Biol., 2:593-596, 1992.

[0171] “Fully human” refers to an immunoglobulin, such as an antibody or antibody fragment, where the whole molecule is of human origin or consists of an amino acid sequence identical to a human form of the antibody or immunoglobulin.

[0172] The term “isolated” means altered or removed from the natural state. For example, a nucleic acid or a peptide naturally present in a living animal is not “isolated,” but the same nucleic acid or peptide partially or completely separated from the coexisting materials of its natural state is “isolated.” An isolated nucleic acid or protein can exist in substantially purified form, or can exist in a non-native environment such as, for example, a host cell.

[0173] The term “operably linked” or “transcriptional control” refers to functional linkage between a regulatory sequence and a heterologous nucleic acid sequence resulting in expression of the latter. For example, a first nucleic acid sequence is operably linked with a second nucleic acid sequence when the first nucleic acid sequence is placed in a functional relationship with the second nucleic acid sequence. For instance, a promoter is operably linked to a coding sequence if the promoter affects the transcription or expression of the coding sequence. The promoter or regulatory sequence may be a cis-acting element or a trans-acting element. Operably linked DNA sequences can be contiguous with each other and, e.g., where necessary to join two protein coding regions, are in the same reading frame.

[0174] The term “parenteral” administration of an immunogenic composition includes, e.g., subcutaneous (s.c.), intravenous (i.v.), intramuscular (i.m.), or intrasternal injection, intratumoral, or infusion techniques.

[0175] The term “nucleic acid” or “polynucleotide” refers to deoxyribonucleic acids (DNA) or ribonucleic acids (RNA) and polymers thereof in either single- or double-stranded form. Unless specifically limited, the term encompasses nucleic acids containing known analogues of natural nucleotides that have similar binding properties as the reference nucleic acid and are metabolized in a manner similar to naturally occurring nucleotides. Unless otherwise indicated, a particular nucleic acid sequence also implicitly encompasses conservatively modified variants thereof (e.g., degenerate codon substitutions), alleles, orthologs, SNPs, and complementary sequences as well as the sequence explicitly indicated. Specifically, degenerate codon substitutions may be achieved by generating sequences in which the third position of one or more selected (or all) codons is substituted with mixed-base and/or deoxyinosine residues (Batzer et al., Nucleic Acid Res. 19:5081 (1991); Ohtsuka et al., J. Biol. Chem. 260:2605-2608 (1985); and Rossolini et al., Mol. Cell. Probes 8:91-98 (1994)).

[0176] The terms “peptide,” “polypeptide,” and “protein” are used interchangeably, and refer to a compound comprised of amino acid residues covalently linked by peptide bonds. A protein or peptide must contain at least two amino acids, and no limitation is placed on the maximum number of amino acids that can comprise a protein's or peptide's sequence. Polypeptides include any peptide or protein comprising two or more amino acids joined to each other by peptide bonds. As used herein, the term refers to both short chains, which also commonly are referred to in the art as peptides, oligopeptides and oligomers, for example, and to longer chains, which generally are referred to in the art as proteins, of which there are many types. “Polypeptides” include, for example, biologically active fragments, substantially homologous polypeptides, oligopeptides, homodimers, heterodimers, variants of polypeptides, modified polypeptides, derivatives, analogs, fusion proteins, among others. A polypeptide includes a natural peptide, a recombinant peptide, or a combination thereof.

[0177] The term “promoter” refers to a DNA sequence recognized by the synthetic machinery of the cell, or introduced synthetic machinery, required to initiate the specific transcription of a polynucleotide sequence.

[0178] The term “promoter/regulatory sequence” refers to a nucleic acid sequence which is required for expression of a gene product operably linked to the promoter/regulatory sequence. In some instances, this sequence may be the core promoter sequence and in other instances, this sequence may also include an enhancer sequence and other regulatory elements which are required for expression of the gene product. The promoter/regulatory sequence may, for example, be one which expresses the gene product in a tissue specific manner.

[0179] A “constitutive” promoter refers to a nucleotide sequence which, when operably linked with a polynucleotide which encodes or specifies a gene product, causes the gene product to be produced in a cell under most or all physiological conditions of the cell.

[0180] An “inducible” promoter refers to a nucleotide sequence which, when operably linked with a polynucleotide which encodes or specifies a gene product, causes the gene product to be produced in a cell substantially only when an inducer which corresponds to the promoter is present in the cell.

[0181] A “tissue-specific” promoter refers to a nucleotide sequence which, when operably linked with a polynucleotide encodes or specified by a gene, causes the gene product to be produced in a cell substantially only if the cell is a cell of the tissue type corresponding to the promoter.

[0182] The terms “cancer associated antigen” or “tumor antigen” interchangeably refers to a molecule (typically a protein, carbohydrate or lipid) that is expressed on the surface of a cancer cell, either entirely or as a fragment (e.g., MHC or peptide fragment), and which is useful for the preferential targeting of a pharmacological agent to the cancer cell. In some embodiments, a tumor antigen is a marker expressed by both normal cells and cancer cells, e.g., a lineage marker, e.g., CD19 on B cells. In some embodiments, a tumor antigen is a cell surface molecule that is overexpressed in a cancer cell in comparison to a normal cell, for instance, 1-fold over expression, 2-fold overexpression, 3-fold overexpression or more in comparison to a normal cell. In some embodiments, a tumor antigen is a cell surface molecule that is underexpressed in a cancer cell in comparison to a normal cell, for instance, 1-fold underexpression, 2-fold underexpression, 3-fold underexpression or more in comparison to a normal cell. In some embodiments, a tumor antigen is a cell surface molecule that is inappropriately synthesized in the cancer cell, for instance, a molecule that contains deletions, additions or mutations in comparison to the molecule expressed on a normal cell.

[0183] In some embodiments, a tumor antigen will be expressed exclusively on the cell surface of a cancer cell, entirely or as a fragment (e.g., MHC or peptide fragment), and not synthesized or expressed on the surface of a normal cell. In some embodiments, the CARs of the present disclosure includes CARs comprising an antigen binding domain (e.g., antibody or antibody fragment) that binds to a tumor antigen or fragment, e.g., a MHC presented peptide.

[0184] Normally, peptides derived from endogenous proteins fill the pockets of Major histocompatibility complex (MHC) class I molecules, and are recognized by T cell receptors (TCRs) on CD8+T lymphocytes. The MHC class I complexes are constitutively expressed by all nucleated cells. In cancer, virus-specific and/or tumor-specific peptide/MHC complexes represent a unique class of cell surface targets for immunotherapy. TCR-like antibodies targeting peptides derived from viral or tumor antigens in the context of human leukocyte antigen (HLA)-A1 or HLA-A2 have been described (see, e.g., Sastry et al., J Virol. 2011 85 (5): 1935-1942; Sergeeva et al., Blood, 2011 117 (16): 4262-4272; Verma et al., J Immunol 2010 184 (4): 2156-2165; Willemsen et al., Gene Ther 2001 8 (21): 1601-1608; Dao et al., Sci Transl Med 2013 5 (176): 176ra33; Tassev et al., Cancer Gene Ther 2012 19 (2): 84-100). For example, TCR-like antibody can be identified from screening a library, such as a human scFv phage displayed library.

[0185] The term “tumor-supporting antigen” or “cancer-supporting antigen” interchangeably refer to a molecule (typically a protein, carbohydrate or lipid) that is expressed on the surface of a cell that is, itself, not cancerous, but supports the cancer cells, e.g., by promoting their growth or survival e.g., resistance to immune cells. Exemplary cells of this type include stromal cells and myeloid-derived suppressor cells (MDSCs). The tumor-supporting antigen itself need not play a role in supporting the tumor cells so long as the antigen is present on a cell that supports cancer cells.

[0186] The term “flexible polypeptide linker” or “linker” as used in the context of a scFv refers to a peptide linker that consists of amino acids such as glycine and/or serine residues used alone or in combination, to link variable heavy and variable light chain regions together. In one embodiment, the flexible polypeptide linker is a Gly/Ser linker and comprises the amino acid sequence (Gly-Gly-Gly-Ser) n, where n is a positive integer equal to or greater than 1. For example, n=1, n=2, n=3. n=4, n=5 and n=6, n=7, n=8, n=9 and n=10 (SEQ ID NO: 32). In one embodiment, the flexible polypeptide linkers include, but are not limited to, (Gly4 Ser) 4 (SEQ ID NO: 34) or (Gly4 Ser) 3 (SEQ ID NO: 35). In another embodiment, the linkers include multiple repeats of (Gly2Ser), (GlySer) or (Gly3Ser) (SEQ ID NO: 36). Also included within the scope of the disclosure are linkers described in WO2012/138475, incorporated herein by reference).

[0187] As used herein in connection with a messenger RNA (mRNA), a 5′ cap (also termed an RNA cap, an RNA 7-methylguanosine cap or an RNA m7G cap) is a modified guanine nucleotide that has been added to the “front” or 5′ end of a eukaryotic messenger RNA shortly after the start of transcription. The 5′ cap consists of a terminal group which is linked to the first transcribed nucleotide. Its presence is critical for recognition by the ribosome and protection from RNases. Cap addition is coupled to transcription, and occurs co-transcriptionally, such that each influences the other. Shortly after the start of transcription, the 5′ end of the mRNA being synthesized is bound by a cap-synthesizing complex associated with RNA polymerase. This enzymatic complex catalyzes the chemical reactions that are required for mRNA capping. Synthesis proceeds as a multi-step biochemical reaction. The capping moiety can be modified to modulate functionality of mRNA such as its stability or efficiency of translation.

[0188] As used herein, “in vitro transcribed RNA” refers to RNA, preferably mRNA, that has been synthesized in vitro. Generally, the in vitro transcribed RNA is generated from an in vitro transcription vector. The in vitro transcription vector comprises a template that is used to generate the in vitro transcribed RNA.

[0189] As used herein, a “poly(A)” is a series of adenosines attached by polyadenylation to the mRNA. In the preferred embodiment of a construct for transient expression, the poly A is between 50 and 5000 (SEQ ID NO: 10517), preferably greater than 64, more preferably greater than 100, most preferably greater than 300 or 400. Poly(A) sequences can be modified chemically or enzymatically to modulate mRNA functionality such as localization, stability or efficiency of translation.

[0190] As used herein, “polyadenylation” refers to the covalent linkage of a polyadenylyl moiety, or its modified variant, to a messenger RNA molecule. In eukaryotic organisms, most messenger RNA (mRNA) molecules are polyadenylated at the 3′ end. The 3′ poly(A) tail is a long sequence of adenine nucleotides (often several hundred) added to the pre-mRNA through the action of an enzyme, polyadenylate polymerase. In higher eukaryotes, the poly(A) tail is added onto transcripts that contain a specific sequence, the polyadenylation signal. The poly(A) tail and the protein bound to it aid in protecting mRNA from degradation by exonucleases. Polyadenylation is also important for transcription termination, export of the mRNA from the nucleus, and translation. Polyadenylation occurs in the nucleus immediately after transcription of DNA into RNA, but additionally can also occur later in the cytoplasm. After transcription has been terminated, the mRNA chain is cleaved through the action of an endonuclease complex associated with RNA polymerase. The cleavage site is usually characterized by the presence of the base sequence AAUAAA near the cleavage site. After the mRNA has been cleaved, adenosine residues are added to the free 3′ end at the cleavage site.

[0191] As used herein, “transient” refers to expression of a non-integrated transgene for a period of hours, days or weeks, wherein the period of time of expression is less than the period of time for expression of the gene if integrated into the genome or contained within a stable plasmid replicon in the host cell.

[0192] As used herein, the terms “treat”, “treatment” and “treating” refer to a partial or complete reduction or amelioration of the progression, severity and/or duration of a proliferative disorder, or the amelioration of one or more symptoms (preferably, one or more discernible symptoms) of a proliferative disorder resulting from the administration of one or more therapies (e.g., one or more therapeutic agents such as a CAR of the disclosure). In specific embodiments, the terms “treat”, “treatment” and “treating” refer to the amelioration of at least one measurable physical parameter of a proliferative disorder, such as growth of a tumor, as well as parameters not necessarily discernible by the patient. In other embodiments the terms “treat”, “treatment” and “treating”-refer to the inhibition of the progression of a proliferative disorder, such as stabilization of a tumor size, either physically by, e.g., stabilization of a discernible symptom, physiologically by, e.g., stabilization of a physical parameter, or both. In other embodiments the terms “treat”, “treatment” and “treating” refer to the reduction or stabilization of tumor size or cancerous cell count.

[0193] A “signal transduction pathway” refers to the biochemical relationship between two or more signal transduction molecules that play a role in the transmission of a signal from one portion of a cell to another portion of the cell or to another cell. The phrase “cell surface receptor” includes molecules and complexes of molecules capable of receiving a signal and transmitting signal across the membrane of a cell.

[0194] A “subject” is intended to include living organisms in which an immune response can be elicited (e.g., a mammal such as a human).

[0195] A “substantially purified” cell refers to a cell that is essentially free of other cell types. A substantially purified cell also refers to a cell which has been separated from other cell types with which it is normally associated in its naturally occurring state. In some instances, a population of substantially purified cells refers to a homogenous population of cells. In other instances, this term refers simply to cell that have been separated from the cells with which they are naturally associated in their natural state. In some aspects, the cells are cultured in vitro. In other aspects, the cells are not cultured in vitro.

[0196] A “therapeutic” as used herein means a treatment. A therapeutic effect is obtained by partial or complete reduction, suppression, remission, or eradication of a disease state or symptom.

[0197] The term “prophylaxis” as used herein means the partial or complete prevention of or protective treatment for a disease or disease state.

[0198] In the context of the present disclosure, “tumor antigen” or “hyperproliferative disorder antigen” or “antigen associated with a hyperproliferative disorder” refers to antigens that are common to specific hyperproliferative disorders. In certain aspects, the hyperproliferative disorder antigens of the present disclosure are derived from, cancers including but not limited to primary or metastatic melanoma, thymoma, lymphoma, sarcoma, lung cancer, liver cancer, non-Hodgkin lymphoma, Hodgkin lymphoma, leukemias, uterine cancer, cervical cancer, bladder cancer, kidney cancer and adenocarcinomas such as breast cancer, prostate cancer, ovarian cancer, pancreatic cancer, and the like.

[0199] The term “transfected” or “transformed” or “transduced” refers to a process by which exogenous nucleic acid is transferred or introduced into the host cell. A “transfected” or “transformed” or “transduced” cell is one which has been transfected, transformed or transduced with exogenous nucleic acid. The cell includes the primary subject cell and its progeny.

[0200] The term “specifically binds,” refers to a molecule that preferentially recognizes and binds a binding partner (e.g., a protein or nucleic acid) over other molecules present in a sample.

[0201] “Membrane anchor” or “membrane tethering domain”, as that term is used herein, refers to a polypeptide or moiety, e.g., a myristoyl group, sufficient to anchor an extracellular or intracellular domain to the plasma membrane.

[0202] The term “bioequivalent” refers to an amount of an agent other than the reference compound (e.g., RAD001), required to produce an effect equivalent to the effect produced by the reference dose or reference amount of the reference compound (e.g., RAD001). In an embodiment the effect is the level of mTOR inhibition, e.g., as measured by P70 S6 kinase inhibition, e.g., as evaluated in an in vivo or in vitro assay, e.g., as measured by an assay described herein, e.g., the Boulay assay. In an embodiment, the effect is alteration of the ratio of PD-1 positive/PD-1 negative T cells, as measured by cell sorting. In an embodiment a bioequivalent amount or dose of an mTOR inhibitor is the amount or dose that achieves the same level of P70 S6 kinase inhibition as does the reference dose or reference amount of a reference compound. In an embodiment, a bioequivalent amount or dose of an mTOR inhibitor is the amount or dose that achieves the same level of alteration in the ratio of PD-1 positive/PD-1 negative T cells as does the reference dose or reference amount of a reference compound.

[0203] The term “low, immune enhancing, dose” when used in conjunction with an mTOR inhibitor, e.g., an allosteric mTOR inhibitor, e.g., RAD001 or rapamycin, or a catalytic mTOR inhibitor, refers to a dose of mTOR inhibitor that partially, but not fully, inhibits mTOR activity, e.g., as measured by the inhibition of P70 S6 kinase activity. Methods for evaluating mTOR activity, e.g., by inhibition of P70 S6 kinase, are discussed herein. The dose is insufficient to result in complete immune suppression but is sufficient to enhance the immune response. In an embodiment, the low, immune enhancing, dose of mTOR inhibitor results in a decrease in the number of PD-1 positive T cells and/or an increase in the number of PD-1 negative T cells, or an increase in the ratio of PD-1 negative T cells/PD-1 positive T cells. In an embodiment, the low, immune enhancing, dose of mTOR inhibitor results in an increase in the number of naive T cells. In an embodiment, the low, immune enhancing, dose of mTOR inhibitor results in one or more of the following:

[0204] an increase in the expression of one or more of the following markers: CD62Lhigh, CD127high, CD27+, and BCL2, e.g., on memory T cells, e.g., memory T cell precursors;

[0205] a decrease in the expression of KLRG1, e.g., on memory T cells, e.g., memory T cell precursors; and

[0206] an increase in the number of memory T cell precursors, e.g., cells with any one or combination of the following characteristics: increased CD62Lhigh, increased CD127high, increased CD27+, decreased KLRG1, and increased BCL2;

[0207] wherein any of the changes described above occurs, e.g., at least transiently, e.g., as compared to a non-treated subject.

[0208] “Refractory” as used herein refers to a disease, e.g., cancer, that does not respond to a treatment. In embodiments, a refractory cancer can be resistant to a treatment before or at the beginning of the treatment. In other embodiments, the refractory cancer can become resistant during a treatment. A refractory cancer is also called a resistant cancer.

[0209] “Relapsed” as used herein refers to the return of a disease (e.g., cancer) or the signs and symptoms of a disease such as cancer after a period of improvement, e.g., after prior treatment of a therapy, e.g., cancer therapy.

[0210] Ranges: throughout this disclosure, various aspects of the disclosure can be presented in a range format. It should be understood that the description in range format is merely for convenience and brevity and should not be construed as an inflexible limitation on the scope of the disclosure. Accordingly, the description of a range should be considered to have specifically disclosed all the possible subranges as well as individual numerical values within that range. For example, description of a range such as from 1 to 6 should be considered to have specifically disclosed subranges such as from 1 to 3, from 1 to 4, from 1 to 5, from 2 to 4, from 2 to 6, from 3 to 6 etc., as well as individual numbers within that range, for example, 1, 2, 2.7, 3, 4, 5, 5.3, and 6. As another example, a range such as 95-99% identity, includes something with 95%, 96%, 97%, 98% or 99% identity, and includes subranges such as 96-99%, 96-98%, 96-97%, 97-99%, 97-98% and 98-99% identity. This applies regardless of the breadth of the range. All specified ranges also include the endpoints unless otherwise stated.

### DETAILED DESCRIPTION

[0211] The gRNA molecules, compositions and methods described herein relate to genome editing, for example, gene editing in eukaryotic cells, in particular at a tet gene intron or intron-exon junction, for example at a TET2 intron or intron-exon junction, for example, using a CRISPR/Cas system, e.g., a Cas9 system, e.g., described herein. In particular embodiments, the gRNA molecules, compositions and methods described herein provide for the targeting of a CRISPR system to a target sequence of an intron, or intron-exon junction of a tet gene, for example a tet2 gene. In further aspects, the disclosure provides for modification (e.g., insertion or deletion) of a target sequence of an intron or intron-exon junction of a tet gene, for example, a tet2 gene. In further aspects, the disclosure provides for insertion of a nucleic acid sequence encoding a heterologous protein, for example a CAR molecule, for example as described herein, at or near the target sequence bound by a gene editing system, e.g., bound by a gRNA molecule described herein, e.g., at an intron, or intron-exon junction, of a tet gene, for example a tet2 gene. Such nucleic acid sequence encoding a heterologous protein may be separately introduced into the cell as a template nucleic acid as described herein, for example, including homology arms, or as part of a vector, or introduced at the same time as the gene editing system.

[0212] Missense, nonsense, and frameshift mutations (i.e., loss-of-function mutations) in the TET2 gene are associated with various cancers, e.g., hematological cancers. See, e.g., Pan et al., IUBMB Life 67 (6): 438-45 (June 2015). Nevertheless, without being bound by theory, the disclosure is based in part on the finding that a CAR gene insertion into the TET2 gene, and in particular into an intron of the TET2 gene, for example the intron between exon 9 and exon 10, results in a CAR-expressing T cell with improved properties. For instance, in some embodiments, a CART cell comprising a CAR gene inserted into one or more copies of the TET2 gene, e.g., an intron of the TET2 gene, is capable of disrupting the expression and/or function of TET2. In some embodiments, the resulting CART cell with TET2 loss-of-function surprisingly is capable of avoiding uncontrolled proliferation and useful in the treatment of cancer, e.g., hematological cancers.

[0213] Without being bound by theory, the insertion of a CAR gene into one or more alleles of the TET2 gene, e.g., an intron of the TET2 gene, may be capable of producing a truncated and/or dominant negative form of TET2 that is capable of partially or fully disrupting full-length form(s) of TET2.

[0214] The disclosure is further based in part on the discovery that partial (but not full) inhibition of the function and/or expression of TET2 may be beneficial to immune effector cell function. In some embodiments, a CAR gene insertion into the TET2 gene, e.g., an intron of the TET2 gene, disrupts one allele of the TET2 gene and results in partial inhibition of the function and/or expression of TET2. In some embodiments, a CAR gene insertion into the TET2 gene, e.g., an intron of the TET2 gene, disrupts both alleles of the TET2 gene and results in full inhibition of the function and/or expression of TET2. The disclosure is also based in part on the recognition of the need for targeted insertion of nucleic acid encoding a heterologous protein, for example a CAR molecule, for example as described herein, into the genome of a cell, for example an immune effector cell, for example specifically at an intron of a tet gene, e.g., at in intron of a TET2 gene, e.g., at the intron between exon 9 and exon 10 of TET2. Thus, in an aspect, the disclosure provides gene editing systems, gRNA molecules, CRISPR systems and methods useful for insertion of nucleic acid sequence encoding a heterologous protein, for example a CAR molecule, for example as described herein, within an intron of the TET2 gene of a cell, for example an immune effector cell, for example as described herein.

[0215] The disclosure is further based in part on the discovery that targeting an intron, e.g., the intron between exon 9 and exon 10 of TET2, may provide a number of advantages. First, for example, the disclosure provides gRNAs that are able to create indels, including 1- or 2-nucleotide deletion indels, at or near target sequences with surprisingly high frequencies, and in particular, combining CRISPR systems comprising these gRNA molecules with a template nucleic acid, e.g., a template nucleic acid encoding a CAR (e.g., as described herein), results in unexpectedly and surprisingly high frequencies of incorporation of sequence of the template nucleic acid at or near the site targeted by the gRNA molecule. These indels and insertions (e.g., insertions of sequence of the template nucleic acid), when created within an exon, can lead to a frameshift mutation and thus significant (e.g., total) inhibition of expression of the protein encoded by the gene. Because of the high frequency of indel formation by these gRNAs, such frameshifts can occur at both alleles of the gene in a high percentage of the cells. Without being bound by theory, targeting an intron sequence with a CRISPR system as disclosed herein, particularly as a site for insertion of nucleic acid encoding a heterologous protein (e.g., sequence of a template nucleic acid), may therefore be beneficial where reduced, but not eliminated, function and/or expression of the target gene is desired because, for example, indels of less than 50 nt, 100 nt, or 150 nt in an intronic region, even if occurring at both alleles of the gene, are not expected to disrupt expression of the functional protein. Because insertion may be a relatively low-frequency event, insertion of the nucleic acid encoding the heterologous protein (e.g., CAR molecule as described herein) may occur in most cells at only one allele of the gene targeted by the CRISPR system. In some embodiments, targeting an intron with a CRISPR system allows for targeted insertion of nucleic acid encoding a heterologous sequence (e.g., CAR molecule, e.g., as described herein) while preserving at least a portion of the expression and/or function of the gene, for example, through the allele which does not comprise the inserted nucleic acid sequence. In alternate embodiments, for example, using the gRNA molecules described herein which result in a surprisingly high rate of incorporation of sequence of the template nucleic acid, targeting an intron with a CRISPR system (e.g., as described herein) allows for targeted insertion of nucleic acid encoding a heterologous sequence (e.g., CAR molecule, e.g., as described herein) while disrupting the expression and/or function of both alleles of the gene. In an aspect, the cell is an immune effector cell, e.g., an NK cell or T cell. In an aspect, the cell is an autologous cell.

[0216] Thus, in an aspect, the disclosure provides a cell, e.g., an immune effector cell, e.g., an immune effector cell comprising a CAR molecule, comprising an indel at or near a target sequence within an intron of a Tet gene, for example within an intron of a Tet2 gene. In an aspect, the disclosure provides a cell, e.g., an immune effector cell, e.g., an immune effector cell comprising a CAR molecule, comprising an indel at or near a target sequence complementary to the targeting domain of a gRNA molecule to a Tet intron sequence, e.g., a Tet2 intron sequence, e.g., complementary to the targeting domain of a gRNA molecule described herein. In an aspect, the disclosure provides a cell, e.g., an immune effector cell, e.g., an immune effector cell comprising a CAR molecule, comprising nucleic acid sequence encoding a heterologous protein (e.g., a CAR molecule, e.g., described herein) integrated into the genome of said cell at or near a target sequence complementary to the targeting domain of a gRNA molecule to a Tet intron sequence, e.g., Tet2 intron sequence, or intron-exon junction sequence, e.g., complementary to the targeting domain of a gRNA molecule described herein. The disclosure further provides methods and compositions useful in connection with said cells

[0217] In any of the aforementioned aspects and embodiments the cell is an autologous cell. Alternatively, In any of the aforementioned aspects and embodiments, the cell is an allogeneic cell. Examples of allogenic cells include those in which expression and/or function of a T cell receptor chain, for example, TRAC or TRBC, has been reduced or eliminated, for example using a genome editing system (e.g., CRISPR system) targeted to said gene. The cell may further comprise reduced or eliminated expression of one or more additional genes, for example, B2M and/or CIITA. In any of the aforementioned embodiments and aspects, the cell is or will be engineered to express a chimeric antigen receptor (CAR), e.g., as described herein. In any of the aforementioned aspects and embodiments, the cell is a T cell.

[0218] Additional features of the gene editing systems, gRNA molecules, the CRISPR systems, Cas9 molecules, cells, CAR molecules, methods and other aspects of the disclosure are described in detail below.

### Gene Editing Systems

[0219] In an aspect, the disclosure provides gene editing systems which target a TET, e.g., TET2, intron sequence, e.g., a sequence selected from the sequences listed in Table 3. Various gene editing systems are described more fully below.

[0220] In some embodiments, the disclosure provides gene editing systems comprising a template nucleic acid encoding a CAR and capable of integrating a CAR nucleic acid sequence such that CAR is expressed and/or TET, e.g., TET2, is disrupted. In some embodiments, the TET, e.g., TET2, is partially disrupted. In some embodiments, the TET, e.g., TET2, is fully disrupted. In some embodiments, only one allele of TET, e.g., TET2, is modified. In some embodiments, both alleles of TET, e.g., TET2, are modified.

### TALEN Gene Editing Systems

[0221] TALENs are produced artificially by fusing a TAL effector DNA binding domain to a DNA cleavage domain. Transcription activator-like effects (TALEs) can be engineered to bind any desired DNA sequence, including a sequence of a TET2 intron, e.g., a sequence within a sequence of Table 3. By combining an engineered TALE with a DNA cleavage domain, a restriction enzyme can be produced which is specific to any desired DNA sequence, including a TET2 intron. These can then be introduced into a cell, wherein they can be used for genome editing. Boch (2011) Nature Biotech. 29:135-6; and Boch et al. (2009) Science 326:1509-12; Moscou et al. (2009) Science 326:3501.

[0222] TALEs are proteins secreted by Xanthomonas bacteria. The DNA binding domain contains a repeated, highly conserved 33-34 amino acid sequence, with the exception of the 12th and 13th amino acids. These two positions are highly variable, showing a strong correlation with specific nucleotide recognition. They can thus be engineered to bind to a desired DNA sequence.

[0223] To produce a TALEN, a TALE protein is fused to a nuclease (N), which is, for example, a wild-type or mutated FokI endonuclease. Several mutations to FokI have been made for its use in TALENs; these, for example, improve cleavage specificity or activity. Cermak et al. (2011) Nucl. Acids Res. 39: e82; Miller et al. (2011) Nature Biotech. 29:143-8; Hockemeyer et al. (2011) Nature Biotech. 29:731-734; Wood et al. (2011) Science 333:307; Doyon et al. (2010) Nature Methods 8:74-79; Szczepek et al. (2007) Nature Biotech. 25:786-793; and Guo et al. (2010) J. Mol. Biol. 200:96.

[0224] The FokI domain functions as a dimer, requiring two constructs with unique DNA binding domains for sites in the target genome with proper orientation and spacing. Both the number of amino acid residues between the TALE DNA binding domain and the FokI cleavage domain and the number of bases between the two individual TALEN binding sites appear to be important parameters for achieving high levels of activity. Miller et al. (2011) Nature Biotech. 29:143-8.

[0225] A TALEN to a TET2 intron sequence, e.g., a sequence listed in Table 3, can be used inside a cell to produce a double-stranded break (DSB). A mutation can be introduced at the break site if the repair mechanisms improperly repair the break via non-homologous end joining. For example, improper repair may introduce a frame shift mutation. Alternatively, template nucleic acid, e.g., as described herein, can be introduced into the cell along with the TALEN, e.g., template nucleic acid encoding a CAR, e.g., as described herein; depending on the sequences of the template nucleic acid and chromosomal sequence, this process can be used to integrate heterologous nucleic acid sequence, e.g., sequence encoding the CAR, e.g., as described herein, at or near the site targeted by the TALEN. Without being bound by theory, such integration may lead to the expression of the CAR as well as disruption, e.g., partial disruption, e.g., disruption of one or more functions, e.g., disruption of only one allele of, TET2. In some embodiments, both alleles of TET, e.g., TET2, are disrupted.

[0226] TALENs specific to sequences in TET2 introns, can be constructed using any method known in the art, including various schemes using modular components. Zhang et al. (2011) Nature Biotech. 29:149-53; Geibler et al. (2011) PLOS ONE 6: e19509; U.S. Pat. Nos. 8,420,782; 8,470,973, the contents of which are hereby incorporated by reference in their entirety.

### Zinc Finger Nuclease (“ZFN”) Gene Editing Systems to a TET2 Intron

[0227] “ZFN” or “zinc finger nuclease” refers to an artificial nuclease which can be used to modify, e.g., delete one or more nucleic acids of, a desired nucleic acid sequence, e.g., a TET2 intron, e.g., a sequence listed in Table 3. Mutant and variant ZFNs are also encompassed.

[0228] Like a TALEN, a ZFN comprises a FokI nuclease domain (or derivative thereof) fused to a DNA-binding domain. In the case of a ZFN, the DNA-binding domain comprises one or more zinc fingers. Carroll et al. (2011) Genetics Society of America 188:773-782; and Kim et al. (1996) Proc. Natl. Acad. Sci. USA 93:1156-1160.

[0229] A zinc finger is a small protein structural motif stabilized by one or more zinc ions. A zinc finger can comprise, for example, Cys2His2, and can recognize an approximately 3-bp sequence. Various zinc fingers of known specificity can be combined to produce multi-finger polypeptides which recognize about 6, 9, 12, 15 or 18-bp sequences. Various selection and modular assembly techniques are available to generate zinc fingers (and combinations thereof) recognizing specific sequences, including phage display, yeast one-hybrid systems, bacterial one-hybrid and two-hybrid systems, and mammalian cells.

[0230] Like a TALEN, a ZFN must dimerize to cleave DNA. Thus, a pair of ZFNs are required to target non-palindromic DNA sites. The two individual ZFNs must bind opposite strands of the DNA with their nucleases properly spaced apart. Bitinaite et al. (1998) Proc. Natl. Acad. Sci. USA 95:10570-5.

[0231] Also like a TALEN, a ZFN can create a double-stranded break in the DNA, which can create a frame-shift mutation if improperly repaired, leading to a decrease in the expression and/or function, e.g., one or more functions, of TET2, e.g., from one allele, in a cell. ZFNs can also be used with homologous recombination to mutate the TET2 intron, or to introduce nucleic acid, e.g., encoding a CAR, at or near a site of the target sequence. As discussed above, the nucleic acid encoding a CAR may be introduced as part of a template nucleic acid. In embodiments, the template nucleic acid further comprises homology arms 5′ to, 3′ to, or both 5′ and 3′ to the nucleic acid of the template nucleic acid which encodes the molecule or molecules of interest (e.g., which encodes a CAR described herein), wherein said homology arms are complementary to genomic DNA sequence flanking the target sequence.

[0232] ZFNs specific to sequences in a TET2 intron, e.g., a sequence of Table 3, can be constructed using any method known in the art. See, e.g., Provasi (2011) Nature Med. 18:807-815; Torikai (2013) Blood 122:1341-1349; Cathomen et al. (2008) Mol. Ther. 16:1200-7; and Guo et al. (2010) J. Mol. Biol. 400:96; U.S. Patent Publication 2011/0158957; and U.S. Patent Publication 2012/0060230, the contents of which are hereby incorporated by reference in their entirety. In embodiments, The ZFN gene editing system may also comprise nucleic acid encoding one or more components of the ZEN gene editing system, e.g., a ZFN gene editing system targeted to a TET2 intron, e.g., a sequence listed in Table 3.

[0233] In a preferred aspect, the gene editing system is a CRISPR system. Additional features of the gRNA molecules, the CRISPR systems, Cas9 molecules, cells, CAR molecules, methods and other aspects of the disclosure are described in detail below.

I. gRNA Molecules

[0234] A gRNA molecule may have a number of domains, as described more fully below; however, a gRNA molecule typically comprises at least a crRNA domain (comprising a targeting domain) and a tracr. In embodiments, the crRNA and the tracr are provided on a single contiguous polynucleotide molecule. In other embodiments, the crRNA and the tracr are provided on separate polynucleotide molecules, which are themselves capable of association, e.g., through non-covalent hybridization. The gRNA molecules, used as a component of a CRISPR system, are useful for modifying (e.g., modifying the sequence) DNA at or near a target site. Such modifications include deletions and or insertions that result in, for example, reduced or eliminated expression of a functional product of the gene comprising the target site. Such modifications can also include insertion of heterologous nucleic acid sequence, for example, nucleic acid sequence encoding a heterologous protein (e.g., a CAR molecule, e.g., as described herein), that may be provided to said cell as a template nucleic acid, as described herein. In some embodiments, the inserted heterologous nucleic acid also serves to eliminate expression of the functional product of the gene comprising the target site. In some embodiments, a separate gRNA molecule and CRISPR system are used to eliminate expression of the functional product of the gene comprising the target site before, at the same time as, or after the insertion of the heterologous nucleic acid. These uses, and others, are described more fully below.

[0235] In an embodiment, a unimolecular, or sgRNA comprises, preferably from 5′ to 3′: a crRNA (which comprises a targeting domain complementary to a target sequence and a region that forms part of a flagpole (i.e., a crRNA flagpole region)); a loop; and a tracr (which comprises a domain complementary to the crRNA flagpole region, and a domain which additionally binds a nuclease or other effector molecule, e.g., a Cas molecule, e.g., a Cas9 molecule), and may take the following format (from 5′ to 3′):
[0236] [targeting domain]-[crRNA flagpole region]-[optional first flagpole extension]-[loop]-[optional first tracr extension]-[tracr flagpole region]-[tracr nuclease binding domain].

[0237] In embodiments, the tracr nuclease binding domain binds to a Cas protein, e.g., a Cas9 protein.

[0238] In an embodiment, a bimolecular, or dgRNA comprises two polynucleotides; the first, preferably from 5′ to 3′: a crRNA (which contains a targeting domain complementary to a target sequence and a region that forms part of a flagpole; and the second, preferably from 5′ to 3′: a tracr (which contains a domain complementary to the crRNA flagpole region, and a domain which additionally binds a nuclease or other effector molecule, e.g., a Cas molecule, e.g., Cas9 molecule), and may take the following format (from 5′ to 3′):
[0239] Polynucleotide 1 (crRNA): [targeting domain]-[crRNA flagpole region]-[optional first flagpole extension]-[optional second flagpole extension]
[0240] Polynucleotide 2 (tracr): [optional first tracr extension]-[tracr flagpole region]-[tracr nuclease binding domain]

[0241] In embodiments, the tracr nuclease binding domain binds to a Cas protein, e.g., a Cas9 protein.

[0242] In some aspects, the targeting domain comprises or consists of a targeting domain sequence described herein, e.g., a targeting domain described in Table 1 or, preferably, a targeting domain described in Table 2, or a targeting domain comprising or consisting of 17, 18, 19, or 20 (preferably 20) consecutive nucleotides of a targeting domain sequence described in Table 1, or Table 2.

[0243] In some aspects, the flagpole, e.g., the crRNA flagpole region, comprises, from 5′ to 3′: GUUUUAGAGCUA (SEQ ID NO: 50).

[0244] In some aspects, the flagpole, e.g., the crRNA flagpole region, comprises, from 5′ to 3′: GUUUAAGAGCUA (SEQ ID NO: 51).

[0245] In some aspects the loop comprises, from 5′ to 3′: GAAA (SEQ ID NO: 52).

[0246] In some aspects the tracr comprises, from 5′ to 3′: UAGCAAGUUAAAAUAAGGCUAGUCCGUUAUCAACUUGAAAAAGUGGCACCGAG UCGGUGC (SEQ ID NO: 53) and is preferably used in a gRNA molecule comprising SEQ ID NO: 50.

[0247] In some aspects the tracr comprises, from 5′ to 3′: UAGCAAGUUUAAAUAAGGCUAGUCCGUUAUCAACUUGAAAAAGUGGCACCGAG UCGGUGC (SEQ ID NO: 54) and is preferably used in a gRNA molecule comprising SEQ ID NO: 51.

[0248] In some aspects, the gRNA may also comprise, at 3′ end, additional U nucleic acids. For example the gRNA may comprise an additional 1, 2, 3, 4, 5, 6, 7, 8, 9, or 10 U nucleic acids at 3′ end (SEQ ID NO: 58). In an embodiment, the gRNA comprises an additional 4 U nucleic acids at 3′ end. In the case of dgRNA, one or more of the polynucleotides of the dgRNA (e.g., the polynucleotide comprising the targeting domain and the polynucleotide comprising the tracr) may comprise, at 3′ end, additional U nucleic acids. For example, the case of dgRNA, one or more of the polynucleotides of the dgRNA (e.g., the polynucleotide comprising the targeting domain and the polynucleotide comprising the tracr) may comprise an additional 1, 2, 3, 4, 5, 6, 7, 8, 9, or 10 U nucleic acids at 3′ end (SEQ ID NO: 58). In an embodiment, in the case of dgRNA, one or more of the polynucleotides of the dgRNA (e.g., the polynucleotide comprising the targeting domain and the polynucleotide comprising the tracr) comprises an additional 4 U nucleic acids at 3′ end. In an embodiment of a dgRNA, only the polynucleotide comprising the tracr comprises the additional U nucleic acid(s), e.g., 4 U nucleic acids. In an embodiment of a dgRNA, only the polynucleotide comprising the targeting domain comprises the additional U nucleic acid(s). In an embodiment of a dgRNA, both the polynucleotide comprising the targeting domain and the polynucleotide comprising the tracr comprise the additional U nucleic acids, e.g., 4 U nucleic acids.

[0249] In some aspects, the gRNA may also comprise, at 3′ end, additional A nucleic acids. For example the gRNA may comprise an additional 1, 2, 3, 4, 5, 6, 7, 8, 9, or 10 A nucleic acids at 3′ end (SEQ ID NO: 59). In an embodiment, the gRNA comprises an additional 4 A nucleic acids at 3′ end. In the case of dgRNA, one or more of the polynucleotides of the dgRNA (e.g., the polynucleotide comprising the targeting domain and the polynucleotide comprising the tracr) may comprise, at 3′ end, additional A nucleic acids. For example, the case of dgRNA, one or more of the polynucleotides of the dgRNA (e.g., the polynucleotide comprising the targeting domain and the polynucleotide comprising the tracr) may comprise an additional 1, 2, 3, 4, 5, 6, 7, 8, 9, or 10 A nucleic acids at 3′ end (SEQ ID NO: 59). In an embodiment, in the case of dgRNA, one or more of the polynucleotides of the dgRNA (e.g., the polynucleotide comprising the targeting domain and the polynucleotide comprising the tracr) comprises an additional 4 A nucleic acids at 3′ end. In an embodiment of a dgRNA, only the polynucleotide comprising the tracr comprises the additional A nucleic acid(s), e.g., 4 A nucleic acids. In an embodiment of a dgRNA, only the polynucleotide comprising the targeting domain comprises the additional A nucleic acid(s). In an embodiment of a dgRNA, both the polynucleotide comprising the targeting domain and the polynucleotide comprising the tracr comprise the additional U nucleic acids, e.g., 4 A nucleic acids.

[0250] In embodiments, one or more of the polynucleotides of the gRNA molecule may comprise a cap at the 5′ end.

[0251] In an embodiment, a unimolecular, or sgRNA comprises, preferably from 5′ to 3′: a crRNA (which contains a targeting domain complementary to a target sequence; a crRNA flagpole region; first flagpole extension; a loop; a first tracr extension (which contains a domain complementary to at least a portion of the first flagpole extension); and a tracr (which contains a domain complementary to the crRNA flagpole region, and a domain which additionally binds a Cas9 molecule). In some aspects, the targeting domain comprises a targeting domain sequence described herein, e.g., a targeting domain described in Table 1 or Table 2, or a targeting domain comprising or consisting of 17, 18, 19, 20 (preferably 20) consecutive nucleotides of a targeting domain sequence described in Table 1 or Table 2, for example 3′ 17, 18, 19 or 20 (preferably 20) consecutive nucleotides of a targeting domain sequence described in Table 1 or Table 2.

[0252] In aspects comprising a first flagpole extension and/or a first tracr extension, the flagpole, loop and tracr sequences may be as described above. In general any first flagpole extension and first tracr extension may be employed, provided that they are complementary. In embodiments, the first flagpole extension and first tracr extension consist of 3, 4, 5, 6, 7, 8, 9, 10 or more complementary nucleotides.

[0253] In some aspects, the first flagpole extension comprises, from 5′ to 3′: UGCUG (SEQ ID NO: 55). In some aspects, the first flagpole extension consists of SEQ ID NO: 55.

[0254] In some aspects, the first tracr extension comprises, from 5′ to 3′: CAGCA (SEQ ID NO: 56). In some aspects, the first tracr extension consists of SEQ ID NO: 56.

[0255] In an embodiment, a dgRNA comprises two nucleic acid molecules. In some aspects, the dgRNA comprises a first nucleic acid which contains, preferably from 5′ to 3′: a targeting domain complementary to a target sequence; a crRNA flagpole region; optionally a first flagpole extension; and, optionally, a second flagpole extension; and a second nucleic acid (which may be referred to herein as a tracr), and comprises at least a domain which binds a Cas molecule, e.g., a Cas9 molecule) comprising preferably from 5′ to 3′: optionally a first tracr extension; and a tracr (which contains a domain complementary to the crRNA flagpole region, and a domain which additionally binds a Cas, e.g., Cas9, molecule). The second nucleic acid may additionally comprise, at 3′ end (e.g., 3′ to the tracr) additional U nucleic acids. For example the tracr may comprise an additional 1, 2, 3, 4, 5, 6, 7, 8, 9, or 10 U nucleic acids at the 3′ end (e.g., 3′ to the tracr) (SEQ ID NO: 58). The second nucleic acid may additionally or alternately comprise, at 3′ end (e.g., 3′ to the tracr) additional A nucleic acids. For example the tracr may comprise an additional 1, 2, 3, 4, 5, 6, 7, 8, 9, or 10 A nucleic acids at the 3′ end (e.g., 3′ to the tracr) (SEQ ID NO: 59). In some aspects, the targeting domain comprises a targeting domain sequence described herein, e.g., a targeting domain described in Table 1 or Table 2, or a targeting domain comprising or consisting of 17, 18, 19, or 20 (preferably 20) consecutive nucleotides of a targeting domain sequence described in Table 1 or Table 2.

[0256] In aspects involving a dgRNA, the crRNA flagpole region, optional first flagpole extension, optional first tracr extension and tracr sequences may be as described above.

[0257] In some aspects, the optional second flagpole extension comprises, from 5′ to 3′: UUUUG (SEQ ID NO: 57).

[0258] In embodiments, 3′ 1, 2, 3, 4, or 5 nucleotides, 5′ 1, 2, 3, 4, or 5 nucleotides, or both 3′ and 5′ 1, 2, 3, 4, or 5 nucleotides of the gRNA molecule (and in the case of a dgRNA molecule, the polynucleotide comprising the targeting domain and/or the polynucleotide comprising the tracr) are modified nucleic acids, as described more fully in section XIII, below.

[0259] The domains are discussed briefly below:

### 1) The Targeting Domain:

[0260] Guidance on the selection of targeting domains can be found, e.g., in Fu Y el al. NAT BIOTECHNOL 2014 (doi: 10.1038/nbt.2808) and Sternberg S H el al. NATURE 2014 (doi: 10.1038/naturel3011).

[0261] The targeting domain comprises a nucleotide sequence that is complementary, e.g., at least 80, 85, 90, 95, or 99% complementary, or e.g., fully complementary, to the target sequence on the target nucleic acid. The targeting domain is part of an RNA molecule and will therefore comprise the base uracil (U), while any DNA encoding the gRNA molecule will comprise the base thymine (T). While not wishing to be bound by theory, it is believed that the complementarity of the targeting domain with the target sequence contributes to specificity of the interaction of the gRNA molecule/Cas9 molecule complex with a target nucleic acid. It is understood that in a targeting domain and target sequence pair, the uracil bases in the targeting domain will pair with the adenine bases in the target sequence.

[0262] In an embodiment, the targeting domain is 5 to 50, e.g., 10 to 40, e.g., 10 to 30, e.g., 15 to 30, e.g., 15 to 25 nucleotides in length. In an embodiment, the targeting domain is 15, 16, 17, 18, 19, 20, 21, 22, 23, 24 or 25 nucleotides in length. In an embodiment, the targeting domain is 16 nucleotides in length. In an embodiment, the targeting domain is 17 nucleotides in length. In an embodiment, the targeting domain is 18 nucleotides in length. In an embodiment, the targeting domain is 19 nucleotides in length. In an embodiment, the targeting domain is 20 nucleotides in length. In an embodiment, the targeting domain is 21 nucleotides in length. In an embodiment, the targeting domain is 22 nucleotides in length. In an embodiment, the targeting domain is 23 nucleotides in length. In an embodiment, the targeting domain is 24 nucleotides in length. In an embodiment, the targeting domain is 25 nucleotides in length. In embodiments, the aforementioned 16, 17, 18, 19, or 20 nucleotides comprise the 5′-16, 17, 18, 19 or 20 nucleotides from a targeting domain described in Table 1 or Table 2. In embodiments, the aforementioned 16, 17, 18, 19, or 20 nucleotides comprise 3′-16, 17, 18, 19 or 20 nucleotides from a targeting domain described in Table 1 or Table 2. In embodiments, the aforementioned 16, 17, 18, 19, or 20 nucleotides consist of 3′-16, 17, 18, 19 or 20 nucleotides from a targeting domain described in Table 1 or Table 2. In embodiments, the targeting domain consists of a targeting domain described in Table 1 or Table 2.

[0263] Without being bound by theory, it is believed that the 8, 9 or 10 nucleic acids of the targeting domain disposed at the 3′ end of the targeting domain may be important for targeting the target sequence, and may thus be referred to as the “core” region of the targeting domain. In an embodiment, the core domain is fully complementary with the target sequence.

[0264] The strand of the target nucleic acid with which the targeting domain is complementary is referred to herein as the target sequence. In some aspects, the target sequence is disposed on a chromosome, e.g., is a target within a gene. In some aspects the target sequence is disposed within an exon of a gene. In some aspects the target sequence is disposed within an intron of a gene. In some aspects, the target sequence comprises, or is proximal (e.g., within 10, 20, 30, 40, 50, 100, 200, 300, 400, 500, or 1000 nucleic acids) to a binding site of a regulatory element, e.g., a promoter or transcription factor binding site, of a gene of interest. Some or all of the nucleotides of the targeting domain can have a modification, e.g., modification found in Section XIII herein.

2) crRNA Flagpole Region:

[0265] The flagpole comprises a portion of gRNA in which the crRNA and the tracr bind or hybridize to one another. The crRNA flagpole region is complementary with a portion of the tracr, and in an embodiment, has sufficient complementarity to a portion of the tracr to form a duplexed region under at least some physiological conditions, for example, normal physiological conditions. In an embodiment, the crRNA flagpole region is 5 to 30 nucleotides in length. In an embodiment, the crRNA flagpole region is 5 to 25 nucleotides in length. The crRNA flagpole region can share homology with, or be derived from, a naturally occurring portion of the repeat sequence from a bacterial CRISPR system. In an embodiment, it has at least 50% homology with a crRNA flagpole region disclosed herein, e.g., an S. pyogenes, or S. thermophilus, crRNA flagpole region.

[0266] In an embodiment, the flagpole, e.g., the crRNA flagpole region, comprises SEQ ID NO: 50. In an embodiment, the flagpole, e.g., the crRNA flagpole region, consists of SEQ ID NO: 50. In an embodiment, the flagpole, e.g., the crRNA flagpole region, comprises sequence having at least 50%, 60%, 70%, 80%, 85%, 90%, 95% or 99% homology with SEQ ID NO: 50. In an embodiment, the flagpole, e.g., the crRNA flagpole region, comprises at least 5, 6, 7, 8, 9, 10, or 11 nucleotides of SEQ ID NO: 50. In an embodiment, the flagpole, e.g., the crRNA flagpole region, comprises SEQ ID NO: 51. In an embodiment, the flagpole, e.g., the crRNA flagpole region, consists of SEQ ID NO: 51. In an embodiment, the flagpole comprises sequence having at least 50%, 60%, 70%, 80%, 85%, 90%, 95% or 99% homology with SEQ ID NO: 51. In an embodiment, the flagpole, e.g., the crRNA flagpole region, comprises at least 5, 6, 7, 8, 9, 10, or 11 nucleotides of SEQ ID NO: 51.

[0267] Some or all of the nucleotides of the domain can have a modification, e.g., modification described in Section XIII herein.

### 3) First Flagpole Extension

[0268] When a tracr comprising a first tracr extension is used, the crRNA may comprise a first flagpole extension. In general any first flagpole extension and first tracr extension may be employed, provided that they are complementary. In embodiments, the first flagpole extension and first tracr extension consist of 3, 4, 5, 6, 7, 8, 9, 10 or more complementary nucleotides.

[0269] The first flagpole extension may comprise nucleotides that are complementary, e.g., 80%, 85%, 90%, 95% or 99%, e.g., fully complementary, with nucleotides of the first tracr extension. In some aspects, the first flagpole extension nucleotides that hybridize with complementary nucleotides of the first tracr extension are contiguous. In some aspects, the first flagpole extension nucleotides that hybridize with complementary nucleotides of the first tracr extension are discontinuous, e.g., comprises two or more regions of hybridization separated by nucleotides that do not base pair with nucleotides of the first tracr extension. In some aspects, the first flagpole extension comprises at least 2, 3, 4, 5, 6, 7, 8, 9, 10, 11, 12, 13, 14, 15, 16, 17, 18, 19, 20 or more nucleotides. In some aspects, the first flagpole extension comprises, from 5′ to 3′: UGCUG (SEQ ID NO: 55). In some aspects, the first flagpole extension consists of, from 5′ to 3′: UGCUG (SEQ ID NO: 55). In some aspects, the first flagpole extension consists of SEQ ID NO: 55. In some aspects the first flagpole extension comprises nucleic acid that is at least 80%, 85%, 90%, 95% or 99% homology to SEQ ID NO: 55.

[0270] Some or all of the nucleotides of the first tracr extension can have a modification, e.g., modification found in Section XIII herein.

### 3) The Loop

[0271] A loop serves to link the crRNA flagpole region (or optionally the first flagpole extension, when present) with the tracr (or optionally the first tracr extension, when present) of a sgRNA. The loop can link the crRNA flagpole region and tracr covalently or non-covalently. In an embodiment, the linkage is covalent. In an embodiment, the loop covalently couples the crRNA flagpole region and tracr. In an embodiment, the loop covalently couples the first flagpole extension and the first tracr extension. In an embodiment, the loop is, or comprises, a covalent bond interposed between the crRNA flagpole region and the domain of the tracr which hybridizes to the crRNA flagpole region. Typically, the loop comprises one or more, e.g., 2, 3, 4, 5, 6, 7, 8, 9, or 10 nucleotides.

[0272] In dgRNA molecules the two molecules can be associated by virtue of the hybridization between at least a portion of the crRNA (e.g., the crRNA flagpole region) and at least a portion of the tracr (e.g., the domain of the tracr which is complementary to the crRNA flagpole region).

[0273] A wide variety of loops are suitable for use in sgRNAs. Loops can consist of a covalent bond, or be as short as one or a few nucleotides, e.g., 1, 2, 3, 4, or 5 nucleotides in length. In an embodiment, a loop is 2, 3, 4, 5, 6, 7, 8, 9, 10, 15, 20, or 25 or more nucleotides in length. In an embodiment, a loop is 2 to 50, 2 to 40, 2 to 30, 2 to 20, 2 to 10, or 2 to 5 nucleotides in length. In an embodiment, a loop shares homology with, or is derived from, a naturally occurring sequence. In an embodiment, the loop has at least 50% homology with a loop disclosed herein. In an embodiment, the loop comprises SEQ ID NO: 52. In an embodiment, the loop consists of SEQ ID NO: 52.

[0274] Some or all of the nucleotides of the domain can have a modification, e.g., modification described in Section XIII herein.

### 4) The Second Flagpole Extension

[0275] In an embodiment, a dgRNA can comprise additional sequence, 3′ to the crRNA flagpole region or, when present, the first flagpole extension, referred to herein as the second flagpole extension. In an embodiment, the second flagpole extension is 2-10, 2-9, 2-8, 2-7, 2-6, 2-5, or 2-4 nucleotides in length. In an embodiment, the second flagpole extension is 2, 3, 4, 5, 6, 7, 8, 9, or 10 or more nucleotides in length. In an embodiment, the second flagpole extension comprises SEQ ID NO: 57. In an embodiment, the second flagpole extension consists of SEQ ID NO: 57.

### 5) The Tracr:

[0276] The tracr is a nucleic acid sequence that can provide for nuclease, e.g., Cas9, binding. Without being bound by theory, it is believed that each Cas9 species is associated with a particular tracr sequence. Tracr sequences are utilized in both sgRNA and in dgRNA systems. The exemplary gRNA targeting domain sequences provided in Table 1 and Table 2 may be utilized in both sgRNA and in dgRNA systems.

[0277] In an embodiment, the tracr comprises sequence from, or derived from, an S. pyogenes tracr. See Jinek et al. (2012). In some aspects, the tracr has a portion that hybridizes to the flagpole portion of the crRNA, e.g., it has sufficient complementarity to the crRNA flagpole region to form a duplexed region under at least some physiological conditions (sometimes referred to herein as the tracr flagpole region or a tracr domain complementary to the crRNA flagpole region). In embodiments, the domain of the tracr that hybridizes with the crRNA flagpole region comprises at least 5, 6, 7, 8, 9, 10, 11, 12, 13, 14, 15, 16, 17, 18, 19, or 20 nucleotides that hybridize with complementary nucleotides of the crRNA flagpole region. In some aspects, the tracr nucleotides that hybridize with complementary nucleotides of the crRNA flagpole region are contiguous. In some aspects, the tracr nucleotides that hybridize with complementary nucleotides of the crRNA flagpole region are discontinuous, e.g., comprises two or more regions of hybridization separated by nucleotides that do not base pair with nucleotides of the crRNA flagpole region. In some aspects, the portion of the tracr that hybridizes to the crRNA flagpole region comprises, from 5′ to 3′: UAGCAAGUUAAAA (SEQ ID NO: 61). In some aspects, the portion of the tracr that hybridizes to the crRNA flagpole region comprises, from 5′ to 3′: UAGCAAGUUUAAA (SEQ ID NO: 62). In embodiments, the sequence that hybridizes with the crRNA flagpole region is disposed on the tracr 5′- to the sequence of the tracr that additionally binds a nuclease, e.g., a Cas molecule, e.g., a Cas9 molecule.

[0278] The tracr further comprises a domain that additionally binds to a nuclease, e.g., a Cas molecule, e.g., a Cas9 molecule. Without being bound by theory, it is believed that Cas9 from different species bind to different tracr sequences. In some aspects, the tracr comprises sequence that binds to a S. pyogenes Cas9 molecule. See Jinek et al. (2012). In some aspects, the tracr comprises sequence that binds to a Cas9 molecule disclosed herein. In some aspects, the domain that additionally binds a Cas9 molecule comprises, from 5′ to 3′: UAAGGCUAGUCCGUUAUCAACUUGAAAAAGUGGCACCGAGUCGGUGC (SEQ ID NO: 63). In some aspects the domain that additionally binds a Cas9 molecule comprises, from 5′ to 3′: UAAGGCUAGUCCGUUAUCAACUUGAAAAAGUGGCACCGAGUCGGUGCUUUU (SEQ ID NO: 64).

In some embodiments, the tracr comprises SEQ ID NO: 53. In some embodiments, the tracr comprises SEQ ID NO: 54. In some embodiments, the tracr consists of SEQ ID NO: 53. In some embodiments, the tracr consists of SEQ ID NO: 54.

[0279] Some or all of the nucleotides of the tracr can have a modification, e.g., modification found in Section XIII herein.

[0280] In embodiments, the gRNA or any of the gRNA components described above comprises an inverted abasic residue at the 5′ end, 3′ end or both 5′ and 3′ end (e.g., in the sgRNA or in the tracr and/or crRNA of a dgRNA). In embodiments, the gRNA or any of the gRNA components described above comprises one or more phosphorothioate bonds. For example, the one or more phosphorothioate bonds can be between residues at the 5′ end of the polynucleotide, for example, a phosphrothioate bond between the first two 5′ residues, between each of the first three 5′ residues, between each of the first four 5′ residues, or between each of the first five 5′ residues (e.g., in the sgRNA or in the tracr and/or crRNA of a dgRNA). In embodiments, the gRNA or gRNA component may alternatively or additionally comprise one or more phosphorothioate bonds between residues at the 3′ end of the polynucleotide, for example, a phosphrothioate bond between the first two 3′ residues, between each of the first three 3′ residues, between each of the first four 3′ residues, or between each of the first five 3′ residues. In an embodiment, the gRNAor gRNA components described above, comprises a phosphorothioate bond between each of the first four 5′ residues (e.g., comprises or consists of, three phosphorothioate bonds at the 5′ end(s)), and a phosphorothioate bond between each of the first four 3′ residues (e.g., comprises or consists of, three phosphorothioate bonds at 3′ end(s)). In an embodiment, any of the phosphorothioate modifications described above can be combined with an inverted abasic residue at the 5′ end, the 3′ end, or both 5′ and 3′ ends of the polynucleotide. In such embodiments, the inverted abasic nucleotide may be linked to the 5′ and/or 3′ nucleotide by a phosphate bond or a phosphorothioate bond.

[0281] In embodiments, the gRNA or gRNA components described above, comprises one or more nucleotides that include a 2′ O-methyl modification. In embodiments, each of the first 1, 2, 3, or more of 5′ residues comprise a 2′ O-methyl modification. In embodiments, each of the first 1, 2, 3, or more of 3′ residues comprise a 2′ O-methyl modification. In embodiments, the 4^{th}-to-terminal, 3^{rd}-to-terminal, and 2^{nd}-to-terminal 3′ residues comprise a 2′ O-methyl modification. In embodiments, each of the first 1, 2, 3 or more of 5′ residues comprise a 2′ O-methyl modification, and each of the first 1, 2, 3 or more of 3′ residues comprise a 2′ O-methyl modification. In an embodiment, each of the first 3 of 5′ residues comprise a 2′ O-methyl modification, and each of the first 3 of 3′ residues comprise a 2′ O-methyl modification. In embodiments, each of the first 3 of 5′ residues comprise a 2′ O-methyl modification, and the 4^{th}-to-terminal, 3^{rd}-to-terminal, and 2^{nd}-to-terminal 3′ residues comprise a 2′ O-methyl modification. In embodiments, any of the 2′ O-methyl modifications described above may be combined with one or more phosphorothioate modifications, e.g., as described above, and/or one or more inverted abasic modifications, e.g., as described above.

[0282] In an embodiment, the gRNA or gRNA components described above, comprises or consists of, a phosphorothioate bond between each of the first four 5′ residues (e.g., comprises or consists of three phosphorothioate bonds at the 5′ end of the polynucleotide(s)), a phosphorothioate bond between each of the first four 3′ residues (e.g., comprises or consists of three phosphorothioate bonds at the 5′ end of the polynucleotide(s)), a 2′ O-methyl modification at each of the first three 5′ residues, and a 2′ O-methyl modification at each of the first three 3′ residues.

[0283] In an embodiment, the gRNA or gRNA components described above, comprises or consists of, a phosphorothioate bond between each of the first four 5′ residues (e.g., comprises or consists of three phosphorothioate bonds at the 5′ end of the polynucleotide(s)), a phosphorothioate bond between each of the first four 3′ residues (e.g., comprises or consists of three phosphorothioate bonds at the 5′ end of the polynucleotide(s)), a 2′ O-methyl modification at each of the first three 5′ residues, and a 2′ O-methyl modification at each of the 4^{th}-to-terminal, 3^{rd}-to-terminal, and 2^{nd}-to-terminal 3′ residues.

[0284] In an embodiment, the gRNA or gRNA components described above, comprises or consists of, a phosphorothioate bond between each of the first four 5′ residues (e.g., comprises or consists of three phosphorothioate bonds at the 5′ end of the polynucleotide(s)), a phosphorothioate bond between each of the first four 3′ residues (e.g., comprises or consists of three phosphorothioate bonds at the 5′ end of the polynucleotide(s)), a 2′ O-methyl modification at each of the first three 5′ residues, a 2′ O-methyl modification at each of the first three 3′ residues, and an additional inverted abasic residue at each of 5′ and 3′ ends.

[0285] In an embodiment, the gRNA or gRNA components described above, comprises or consists of, a phosphorothioate bond between each of the first four 5′ residues (e.g., comprises or consists of three phosphorothioate bonds at the 5′ end of the polynucleotide(s)), a phosphorothioate bond between each of the first four 3′ residues (e.g., comprises or consists of three phosphorothioate bonds at the 5′ end of the polynucleotide(s)), a 2′ O-methyl modification at each of the first three 5′ residues, and a 2′ O-methyl modification at each of the 4^{th}-to-terminal, 3^{rd}-to-terminal, and 2^{nd}-to-terminal 3′ residues, and an additional inverted abasic residue at each of 5′ and 3′ ends.

[0286] Specific embodiments of gRNA molecules are described in detail below. Although each is shown with 20 nucleic acid residues of the targeting domain (N's in each of the sequences below), it will be understood that the targeting domain may comprise or consist of 5-50 residues, e.g., 15-30 residues, e.g., 15-25 residues, e.g., 15, 16, 17, 18, 19, 20, 21, 22, 23, 24, or 25 residues. In embodiments, the gRNA is a dgRNA and comprises or consists of: crRNA:

[0287] mN*mN*mN*NNNNNNNNNNNNNNNNNGUUUUAGAGCUAU*mG*mC*mU (SEQ ID NO: 66), where m indicates a base with 2′O-Methyl modification, * indicates a phosphorothioate bond, and N's indicate the residues of the targeting domain, e.g., as described herein (optionally with an inverted abasic residue at 5′ and/or 3′ terminus); and tracr:

[0288] AACAGCAUAGCAAGUUAAAAUAAGGCUAGUCCGUUAUCAACUUGAAA AAGUGGCACCGAGUCGGUGCUUUUUUU (SEQ ID NO: 65) (optionally with an inverted abasic residue at 5′ and/or 3′ terminus).

[0289] In embodiments, the gRNA is a dgRNA and comprises or consists of: crRNA:

[0290] mN*mN*mN*NNNNNNNNNNNNNNNNNGUUUUAGAGCUAU*mG*mC*mU (SEQ ID NO: 66), where m indicates a base with 2′O-Methyl modification, * indicates a phosphorothioate bond, and N's indicate the residues of the targeting domain, e.g., as described herein, (optionally with an inverted abasic residue at 5′ and/or 3′ terminus); and tracr:

[0291] mA*mA*mC*AGCAUAGCAAGUUAAAAUAAGGCUAGUCCGUUAUCAAC UUGAAAAAGUGGCACCGAGUCGGUGCUUUU*mU*mU*mU (SEQ ID NO: 67), where m indicates a base with 2′O-Methyl modification, * indicates a phosphorothioate bond, and N's indicate the residues of the targeting domain (optionally with an inverted abasic residue at the 5′ and/or 3′ terminus).

[0292] In embodiments, the gRNA is a dgRNA and comprises or consists of: crRNA:

[0293] mN*mN*mN*NNNNNNNNNNNNNNNNNGUUUUAGAGCUAUGCUGUU*m U*mU*mG (SEQ ID NO: 68), where m indicates a base with 2′O-Methyl modification, * indicates a phosphorothioate bond, and N's indicate the residues of the targeting domain, e.g., as described herein, (optionally with an inverted abasic residue at 5′ and/or 3′ terminus); and tracr:

[0294] AACAGCAUAGCAAGUUAAAAUAAGGCUAGUCCGUUAUCAACUUGAAA AAGUGGCACCGAGUCGGUGCUUUUUUU (SEQ ID NO: 65) (optionally with an inverted abasic residue at 5′ and/or 3′ terminus).

[0295] In embodiments, the gRNA is a dgRNA and comprises or consists of: crRNA:

[0296] mN*mN*mN*NNNNNNNNNNNNNNNNNGUUUUAGAGCUAUGCUGUU*m U*mU*mG (SEQ ID NO: 68), where m indicates a base with 2′O-Methyl modification, * indicates a phosphorothioate bond, and N's indicate the residues of the targeting domain, e.g., as described herein, (optionally with an inverted abasic residue at 5′ and/or 3′ terminus); and tracr:

[0297] mA*mA*mC*AGCAUAGCAAGUUAAAAUAAGGCUAGUCCGUUAUCAAC UUGAAAAAGUGGCACCGAGUCGGUGCUUUU*mU*mU*mU (SEQ ID NO: 67), where m indicates a base with 2′O-Methyl modification, and * indicates a phosphorothioate bond (optionally with an inverted abasic residue at 5′ and/or 3′ terminus).

[0298] In embodiments, the gRNA is a sgRNA and comprises or consists of:

[0299] mN*mN*mN*NNNNNNNNNNNNNNNNNGUUUUAGAGCUAGAAAUAGCA AGUUAAAAUAAGGCUAGUCCGUUAUCAACUUGAAAAAGUGGCACCGAGUCGGU GCU*mU*mU*mU (SEQ ID NO: 69), where m indicates a base with 2′O-Methyl modification, * indicates a phosphorothioate bond, and N's indicate the residues of the targeting domain, e.g., as described herein, (optionally with an inverted abasic residue at 5′ and/or 3′ terminus).

[0300] In embodiments, the gRNA is a sgRNA and comprises or consists of:

[0301] mN*mN*mN*NNNNNNNNNNNNNNNNNGUUUUAGAGCUAGAAAUAGCA AGUUAAAAUAAGGCUAGUCCGUUAUCAACUUGAAAAAGUGGCACCGAGUCGGU GCmU*mU*mU*U (SEQ ID NO: 70, where m indicates a base with 2′O-Methyl modification, * indicates a phosphorothioate bond, and N's indicate the residues of the targeting domain, e.g., as described herein, (optionally with an inverted abasic residue at 5′ and/or 3′ terminus).

### 6) First Tracr Extension

[0302] Where the gRNA comprises a first flagpole extension, the tracr may comprise a first tracr extension. The first tracr extension may comprise nucleotides that are complementary, e.g., 80%, 85%, 90%, 95% or 99%, e.g., fully complementary to nucleotides of the first flagpole extension. In some aspects, the first tracr extension nucleotides that hybridize with complementary nucleotides of the first flagpole extension are contiguous. In some aspects, the first tracr extension nucleotides that hybridize with complementary nucleotides of the first flagpole extension are discontinuous, e.g., comprises two or more regions of hybridization separated by nucleotides that do not base pair with nucleotides of the first flagpole extension. In some aspects, the first tracr extension comprises at least 2, 3, 4, 5, 6, 7, 8, 9, 10, 11, 12, 13, 14, 15, 16, 17, 18, 19, 20 or more nucleotides. In some aspects, the first tracr extension comprises SEQ ID NO: 56. In some aspects the first tracr extension comprises nucleic acid that is at least 80%, 85%, 90%, 95% or 99% homology to SEQ ID NO: 56.

[0303] Some or all of the nucleotides of the first tracr extension can have a modification, e.g., modification found in Section XIII herein.

[0304] In some embodiments, the sgRNA may comprise, from 5′ to 3′ and disposed 3′ to the targeting domain:

a)
(SEQ ID NO: 71)
GUUUUAGAGCUAGAAAUAGCAAGUUAAAAUAAGGCUAGUCCGUUAUCAA
CUUGAAAAAGUGGCACCGAGUCGGUGC;
b)
(SEQ ID NO: 72)
GUUUAAGAGCUAGAAAUAGCAAGUUUAAAUAAGGCUAGUCCGUUAUCAA
CUUGAAAAAGUGGCACCGAGUCGGUGC;
c)
(SEQ ID NO: 73)
GUUUUAGAGCUAUGCUGGAAACAGCAUAGCAAGUUAAAAUAAGGCUAGU
CCGUUAUCAACUUGAAAAAGUGGCACCGAGUCGGUGC;
d)
(SEQ ID NO: 74)
GUUUAAGAGCUAUGCUGGAAACAGCAUAGCAAGUUUAAAUAAGGCUAGU
CCGUUAUCAACUUGAAAAAGUGGCACCGAGUCGGUGC;

[0305] e) any of a) to d), above, further comprising, at 3′ end, at least 1, 2, 3, 4, 5, 6 or 7 uracil (U) nucleotides, e.g., 1, 2, 3, 4, 5, 6, or 7 uracil (U) nucleotides;
[0306] f) any of a) to d), above, further comprising, at 3′ end, at least 1, 2, 3, 4, 5, 6 or 7 adenine (A) nucleotides, e.g., 1, 2, 3, 4, 5, 6, or 7 adenine (A) nucleotides; or
[0307] g) any of a) to f), above, further comprising, at the 5′ end (e.g., at the 5′ terminus, e.g., 5′ to the targeting domain), at least 1, 2, 3, 4, 5, 6 or 7 adenine (A) nucleotides, e.g., 1, 2, 3, 4, 5, 6, or 7 adenine (A) nucleotides.

[0308] In an embodiment, a sgRNA of the disclosure comprises or consists of, from 5′ to 3′: [targeting domain]-

(SEQ ID NO: 75)
GUUUUAGAGCUAGAAAUAGCAAGUUAAAAUAAGGCUAGUCCGUUAUCAA
CUUGAAAAAGUGGCACCGAGUCGGUGCUUUU.

[0309] In an embodiment, a sgRNA of the disclosure comprises or consists of, from 5′ to 3′: [targeting domain]-

(SEQ ID NO: 76)
GUUUAAGAGCUAUGCUGGAAACAGCAUAGCAAGUUUAAAUAAGGCUAGU
CCGUUAUCAACUUGAAAAAGUGGCACCGAGUCGGUGCUUUU.

[0310] In embodiments, any of a) to g) above is disposed directly 3′ to the targeting domain.

[0311] In some embodiments, the dgRNA may comprise:

[0312] A crRNA comprising, from 5′ to 3′, preferably disposed directly 3′ to the targeting domain:

a)
(SEQ ID NO: 50)
GUUUUAGAGCUA;
b)
(SEQ ID NO: 51)
GUUUAAGAGCUA;
c)
(SEQ ID NO: 77)
GUUUUAGAGCUAUGCUG;
d)
(SEQ ID NO: 78)
GUUUAAGAGCUAUGCUG;
e)
(SEQ ID NO: 79)
GUUUUAGAGCUAUGCUGUUUUG;
f)
(SEQ ID NO: 80)
GUUUAAGAGCUAUGCUGUUUUG;
or
g)
(SEQ ID NO: 81)
GUUUUAGAGCUAUGCU:

[0313] and a tracr comprising, from 5′ to 3′:

a)
(SEQ ID NO: 53)
UAGCAAGUUAAAAUAAGGCUAGUCCGUUAUCAACUUGAAAAAGUGGCAC
CGAGUCGGUGC;
b)
(SEQ ID NO: 54)
UAGCAAGUUUAAAUAAGGCUAGUCCGUUAUCAACUUGAAAAAGUGGCAC
CGAGUCGGUGC;
c)
(SEQ ID NO: 82)
CAGCAUAGCAAGUUAAAAUAAGGCUAGUCCGUUAUCAACUUGAAAAAGU
GGCACCGAGUCGGUGC;
d)
(SEQ ID NO: 83)
CAGCAUAGCAAGUUUAAAUAAGGCUAGUCCGUUAUCAACUUGAAAAAGU
GGCACCGAGUCGGUGC;
e)
(SEQ ID NO: 65)
AACAGCAUAGCAAGUUAAAAUAAGGCUAGUCCGUUAUCAACUUGAAAAA
GUGGCACCGAGUCGGUGCUUUUUUU;
f)
(SEQ ID NO: 84)
AACAGCAUAGCAAGUUUAAAUAAGGCUAGUCCGUUAUCAACUUGAAAAA
GUGGCACCGAGUCGGUGCUUUUUUU;
g)
(SEQ ID NO: 76)
GUUUAAGAGCUAUGCUGGAAACAGCAUAGCAAGUUUAAAUAAGGCUAGU
CCGUUAUCAACUUGAAAAAGUGGCACCGAGUCGGUGCUUUU;
h)
(SEQ ID NO: 85)
AGCAUAGCAAGUUAAAAUAAGGCUAGUCCGUUAUCAACUUGAAAAAGUG
GCACCGAGUCGGUGCUUU;
i)
(SEQ ID NO: 86)
GUUGGAACCAUUCAAAACAGCAUAGCAAGUUAAAAUAAGGCUAGUCCGU
UAUCAACUUGAAAAAGUGGCACCGAGUCGGUGCUUU;
j)
(SEQ ID NO: 87)
AACAGCAUAGCAAGUUAAAAUAAGGCUAGUCCGUUAUCAACUUGAAAAA
GUGGCACCGAGUCGGUGC;

[0314] k) any of a) to j), above, further comprising, at 3′ end, at least 1, 2, 3, 4, 5, 6 or 7 uracil (U) nucleotides, e.g., 1, 2, 3, 4, 5, 6, or 7 uracil (U) nucleotides;

[0315] l) any of a) to j), above, further comprising, at 3′ end, at least 1, 2, 3, 4, 5, 6 or 7 adenine (A) nucleotides, e.g., 1, 2, 3, 4, 5, 6, or 7 adenine (A) nucleotides; or

[0316] m) any of a) to 1), above, further comprising, at the 5′ end (e.g., at the 5′ terminus), at least 1, 2, 3, 4, 5, 6 or 7 adenine (A) nucleotides, e.g., 1, 2, 3, 4, 5, 6, or 7 adenine (A) nucleotides.

[0317] In an embodiment, the sequence of k), above comprises 3′ sequence UUUUUU, e.g., if a U6 promoter is used for transcription. In an embodiment, the sequence of k), above, comprises 3′ sequence UUUU, e.g., if an HI promoter is used for transcription. In an embodiment, sequence of k), above, comprises variable numbers of 3′ U's depending, e.g., on the termination signal of the pol-III promoter used. In an embodiment, the sequence of k), above, comprises variable 3′ sequence derived from the DNA template if a T7 promoter is used. In an embodiment, the sequence of k), above, comprises variable 3′ sequence derived from the DNA template, e.g., if in vitro transcription is used to generate the RNA molecule. In an embodiment, the sequence of k), above, comprises variable 3′ sequence derived from the DNA template, e.g., if a pol-II promoter is used to drive transcription.

[0318] In an embodiment, the crRNA comprises SEQ ID NO: 79 and the tracr comprises or consists of

(SEQ ID NO: 65)
AACAGCAUAGCAAGUUAAAAUAAGGCUAGUCCGUUAUCAACUUGAAAAA
GUGGCACCGAGUCGGUGCUUUUUUU.

[0319] In an embodiment, the crRNA comprises SEQ ID NO: 80 and the tracr comprises or consists of,

(SEQ ID NO: 84)
AACAGCAUAGCAAGUUUAAAUAAGGCUAGUCCGUUAUCAACUUGAAAAA
GUGGCACCGAGUCGGUGCUUUUUUU.

[0320] In an embodiment, the crRNA comprises or consists of, a targeting domain and, disposed 3′ to the targeting domain (e.g., disposed directly 3′ to the targeting domain), a sequence comprising, e.g., consisting of, GUUUUAGAGCUAUGCU (SEQ ID NO: 81), and the tracr comprises or consists of,

(SEQ ID NO: 76)
GUUUAAGAGCUAUGCUGGAAACAGCAUAGCAAGUUUAAAUAAGGCUAGU
CCGUUAUCAACUUGAAAAAGUGGCACCGAGUCGGUGCUUUU.

[0321] In an embodiment, the crRNA comprises or consists of, a targeting domain and, disposed 3′ to the targeting domain (e.g., disposed directly 3′ to the targeting domain), a sequence comprising, e.g., consisting of, GUUUUAGAGCUAUGCU (SEQ ID NO: 81), and the tracr comprises or consists of,

(SEQ ID NO: 85)
AGCAUAGCAAGUUAAAAUAAGGCUAGUCCGUUAUCAACUUGAAAAAGUG
GCACCGAGUCGGUGCUUU.

[0322] In an embodiment, the crRNA comprises or consists of, a targeting domain and, disposed 3′ to the targeting domain (e.g., disposed directly 3′ to the targeting domain), a sequence comprising, e.g., consisting of, GUUUUAGAGCUAUGCUGUUUUG (SEQ ID NO: 79), and the tracr comprises or consists of,

(SEQ ID NO: 86)
GUUGGAACCAUUCAAAACAGCAUAGCAAGUUAAAAUAAGGCUAGUCCGU
UAUCAACUUGAAAAAGUGGCACCGAGUCGGUGCUUU.

[0323] Targeting Domains Useful for gRNA molecules and other aspects of the disclosure.

[0324] Provided in the tables below are targeting domains for gRNA molecules for use in the CRISPR systems, cells, compositions and methods of the present disclosure, for example, in reducing or eliminating the expression and/or function of TET2 and/or insertion of heterologous nucleic acid sequence (e.g., nucleic acid sequence encoding a CAR, e.g., as described herein) at or near a target sequence of TET2, e.g., of a TET2 intron or intron-exon junction.

Lengthy table referenced here
US20250109401A1-20250403-T00001
Please refer to the end of the specification for access instructions.

[0325] In preferred embodiments, the gRNA molecule targets a sequence in the intron between exon 9 and exon 10, or targets an intron-exon junction which introduces a break in the DNA in said intron. Examples of such gRNA molecules are gRNA molecules comprising, e.g., consisting of, a targeting domain of any one of SEQ ID NO: 10102 to SEQ ID NO: 10324. Particularly preferred gRNA molecules are gRNA molecules comprising, e.g., consisting of, a targeting domain shown in Table 2.

Table 2: Exemplary gRNA Targeting Domains for the TET2 intron between exon 9 and exon 10 (mm0, mm1, mm2 and mm3 refer to the predicted number of target sequences within the genome with 0, 1 2, or 3 mismatch bases, respectively). Throughout this application, gRNAs comprising the targeting domains listed in this Table 2 may be referred to as “gX” where “X” indicates the second number of the “ID” shown in this table (thus, for example, a gRNA comprising the targeting domain of HTET2_1 may be referred to herein as “g1.”

| | | gRNA Targeting Domain | SEQ ID | | | | |
|---|---|---|---|---|---|---|---|
| ID | Strand | Sequence (20 nt) | NO: | mm0 | mm1 | mm2 | mm3 |
| HTET2_1 | + | UGGAUCGGUCUUGUAAUUGG | 10148 | 1 | 0 | 0 | 1 |
| (g1) | | | | | | | |
| HTET2_2 | + | CUGUGAGGCACAUUAGCCGU | 10184 | 1 | 0 | 0 | 1 |
| HTET2_3 | − | CUUUGUCGGCAAGUCUUGAC | 10483 | 1 | 0 | 0 | 1 |
| HTET2_4 | + | GGCACAUUAGCCGUAGGUUC | 10185 | 1 | 0 | 0 | 2 |
| (g4) | | | | | | | |
| HTET2_5 | + | GUCUCUGACGUGGAUGAGUU | 10484 | 1 | 0 | 0 | 2 |
| HTET2_6 | + | CUAGCACUCUCAUGAUAGGU | 10137 | 1 | 0 | 0 | 3 |
| HTET2_7 | + | GCCAGUUACAGUUAACUUCC | 10140 | 1 | 0 | 0 | 3 |
| HTET2_8 | + | AGAGCACCAGAGUGCCGUCU | 10485 | 1 | 0 | 0 | 4 |
| HTET2_9 | + | CACAUUGGUAAGUUGGGCUG | 10104 | 1 | 0 | 0 | 4 |
| HTET2_10 | + | GUCACUGAUCUGGAUCAACU | 10233 | 1 | 0 | 0 | 4 |
| (g10) | | | | | | | |
| HTET2_11 | + | UCUCUGACGUGGAUGAGUUU | 10486 | 1 | 0 | 0 | 4 |
| HTET2_12 | + | CAGUCAAGACUUGCCGACAA | 10487 | 1 | O | 0 | 4 |
| HTET2_13 | − | GUGAGAGUGCAUACCUGGUA | 10488 | 1 | 0 | 0 | 4 |
| HTET2_14 | − | CUCUAGUGAGAGUGCAUACC | 10489 | 1 | 0 | 0 | 4 |
| HTET2_15 | − | AUUUGAGCUGUUCUCCAGGG | 10490 | 1 | 0 | 0 | 4 |
| HTET2_16 | + | CAGAGCACCAGAGUGCCGUC | 10491 | 1 | 0 | 0 | 5 |
| HTET2_17 | + | AGCACCUGCUCAUUAUUAGG | 10188 | 1 | 0 | 0 | 5 |
| (g17) | | | | | | | |
| HTET2_18 | + | CGCAAGCCAGGCUAAACAGU | 10492 | 1 | 0 | 0 | 5 |
| HTET2_19 | + | CAUGUUGAGGAGCAGAACAC | 10131 | 1 | 0 | 0 | 6 |
| HTET2_20 | + | GGUUUGACAGAGUACAAAGG | 10209 | 1 | 0 | 0 | 6 |
| (g20) | | | | | | | |
| HTET2_21 | + | AACAGAGAGAGUUAGGUGUC | 10212 | 1 | 0 | 0 | 6 |
| (g21) | | | | | | | |
| HTET2_22 | − | CUAUCAGGAACAGUUAGCUG | 10317 | 1 | 0 | 0 | 6 |
| (g22) | | | | | | | |
| HTET2_23 | − | ACCCUUUCUCUGAGUCUAUC | 10318 | 1 | 0 | 0 | 6 |
| (g23) | | | | | | | |
| HTET2_24 | + | AUGUUGUCUGCAGGUUUCAC | 10134 | 1 | 0 | 0 | 7 |
| HTET2_25 | + | CUCAGCACCUGCUCAUUAUU | 10187 | 1 | 0 | 0 | 7 |
| (g25) | | | | | | | |
| HTET2_26 | − | AGUGCUAGUUAUGCCAAAGC | 10257 | 1 | 0 | 1 | 2 |
| HTET2_27 | + | AGAGUGCCGUCUGGGUCUGA | 10516 | 1 | 0 | 0 | 8 |
| HTET2_28 | + | AAGGAAGGCCGUCCAUUCUC | 10493 | 1 | 0 | 1 | 3 |
| HTET2_29 | + | AUCAGCAGCAUCUCAUGUUG | 10130 | 1 | 0 | 1 | 4 |
| HTET2_30 | + | UUCUUUGGGACCUGUAGUUG | 10237 | 1 | 0 | 0 | 9 |
| HTET2_31 | − | AACUGGCAAUGCAUAGUCAC | 10260 | 1 | 0 | 0 | 9 |
| HTET2_32 | − | AGUGAGAGUGCAUACCUGGU | 10494 | 1 | 0 | 0 | 10 |
| HTET2_33 | + | AGGAAGGCCGUCCAUUCUCA | 10495 | 1 | 0 | 0 | 11 |
| HTET2_34 | + | UGAUAGACUCAGAGAAAGGG | 10224 | 1 | 0 | 0 | 11 |
| (g34) | | | | | | | |
| HTET2_35 | − | UUCAGACCCAGACGGCACUC | 10496 | 1 | 0 | 0 | 11 |
| HTET2_36 | − | ACGUGAAGCUGCUCAUCCUC | 10497 | 1 | 0 | 1 | 6 |
| HTET2_37 | + | GGAAGGCCGUCCAUUCUCAG | 10498 | 1 | 0 | 1 | 7 |
| HTET2_38 | + | AUGGCAGCACAUUGGUAAGU | 10102 | 1 | 0 | 1 | 7 |
| HTET2_39 | − | GCAUGUUGUGCAAGUCUCUG | 10499 | 1 | 0 | 1 | 7 |
| HTET2_40 | + | GACUUGCACAACAUGCAGAA | 10500 | 1 | 0 | 1 | 8 |
| HTET2_41 | + | GUUUGGGAGUGUGGAAGCUC | 10501 | 1 | 0 | 1 | 8 |
| HTET2_42 | − | CAGAACCCAUGCUCUAUCAG | 10292 | 1 | 0 | 0 | 13 |
| (g42) | | | | | | | |
| HTET2_43 | − | GACAUUACAGCCUCAACUAC | 10324 | 1 | 0 | 1 | 8 |
| HTET2_44 | + | CAUGCAGAAUGGCAGCACAU | 10502 | 1 | 0 | 1 | 9 |
| HTET2_45 | + | GGUCUUGUAAUUGGAGGCAG | 10149 | 1 | 0 | 1 | 12 |
| (g45) | | | | | | | |
| HTET2_46 | + | CGUGGAUGAGUUUGGGAGUG | 10503 | 1 | 1 | 0 | 7 |
| HTET2_47 | + | UGUUGCAAAGUGACCUGCUU | 10135 | 1 | 0 | 1 | 13 |
| HTET2_48 | + | UUAGGGACUGCAGGCCACAU | 10177 | 1 | 0 | 2 | 8 |
| (g48) | | | | | | | |
| HTET2_49 | − | CAUGUUGUGCAAGUCUCUGU | 10504 | 1 | 0 | 1 | 14 |
| HTET2_50 | + | UGGCAGCACAUUGGUAAGUU | 10103 | 1 | 0 | 3 | 5 |
| HTET2_51 | + | UGGGAGUGUGGAAGCUCAGG | 10505 | 1 | 0 | 2 | 11 |
| HTET2_52 | + | UGCCGUCUGGGUCUGAAGGA | 10506 | 1 | 1 | 0 | 13 |
| HTET2_53 | − | AAAGCAGGUCACUUUGCAAC | 10256 | 1 | 0 | 0 | 24 |
| HTET2_54 | + | GUAAUUGGAGGCAGUGGUGA | 10151 | 1 | 0 | 1 | 20 |
| (g54) | | | | | | | |
| HTET2_55 | + | GAUAGACUCAGAGAAAGGGU | 10225 | 1 | 1 | 0 | 15 |
| (g55) | | | | | | | |
| HTET2_56 | − | GGCCUUCCUUCAGACCCAGA | 10507 | 1 | 0 | 3 | 10 |
| HTET2_57 | − | GAGAUGCUGCUGAUAUGGUC | 10508 | 1 | 0 | 1 | 20 |
| HTET2_58 | − | CCUCACAGCUUGUGUUUGUA | 10509 | 1 | 0 | 2 | 15 |
| (g58) | | | | | | | |
| HTET2_59 | − | CACCUUCCUGGAAUGAAACA | 10290 | 1 | 0 | 2 | 16 |
| (g59) | | | | | | | |
| HTET2_60 | − | AGGCCUUGUGUUUGUUCUUC | 10281 | 1 | 0 | 0 | 29 |
| (g60) | | | | | | | |
| HTET2_61 | − | CUUACUCUCUGUCACCUUCC | 10291 | 1 | 0 | 2 | 20 |
| HTET2_62 | + | GACUCAGAGAAAGGGUGGGU | 10227 | 1 | 0 | 2 | 23 |
| HTET2_63 | + | CCAUACAAACACAAGCUGUG | 10183 | 1 | 1 | 4 | 27 |
| HTET2_64 | + | UAAUUGGAGGCAGUGGUGAG | 10152 | 1 | 0 | 3 | 43 |
| HTET2_65 | + | ACUUCUGUGCAGAAAGUGAC | 10204 | 1 | 0 | 6 | 29 |
| HTET2_66 | + | UGUAAUUGGAGGCAGUGGUG | 10150 | 1 | 0 | 13 | 54 |
| HTET2_67 | − | AUCUUUCCCAUGCUGUUCUC | 10510 | 2 | 11 | 17 | 60 |
| HTET2_68 | + | AGACUCAGAGAAAGGGUGGG | 10226 | 2 | 11 | 19 | 146 |
| HTET2_69 | + | UUACUCUCCUGAGAACAGCA | 10119 | 2 | 13 | 228 | 616 |
| HTET2_70 | − | UUUGGGAAGGACCCAGUGGG | 10511 | 2. | 11 | 153 | 1725 |
| HTET2_71 | + | UACUCUCCUGAGAACAGCAU | 10120 | 2 | 9 | 258 | 2845 |
| HTET2_72 | + | AGGCAAGAGAACAUGUGCAG | 10118 | 29 | 421 | 980 | 1176 |
| HTET2_73 | + | GUCACAUCUUACAUGGCGGC | 10115 | 55 | 443 | 718 | 1851 |
| HTET2_74 | + | GCAGGCAAGAGAACAUGUGC | 10116 | 34 | 455 | 1021 | 1158 |
| HTET2_75 | + | CAGGCAAGAGAACAUGUGCA | 10117 | 34 | 464 | 1106 | 1320 |
| HTET2_76 | − | UGCCUUCAGCUAUGAUUGUG | 10512 | 6 | 139 | 2157 | 3694 |
| HTET2_77 | + | GGCCUCACAAUCAUAGCUGA | 10111 | 8 | 214 | 2983 | 5040 |
| HTET2_78 | − | GUGAGGCCUCCACAGCCAUG | 10513 | 61 | 3080 | 6406 | 5844 |
| HTET2_79 | + | ACAGUUCCACAUGGCUGUGG | 10110 | 105 | 4569 | 5714 | 6456 |
| HTET2_80 | − | GGGAGGUAAUUGAAUCAUGG | 10514 | 2987 | 5462 | 8029 | 8107 |
| HTET2_81 | + | CUCACAGUUCCACAUGGCUG | 10109 | 3142 | 6162 | 7491 | 5859 |

[0326] Particularly preferred gRNA molecules are gRNA molecules comprising, e.g., consisting of a targeting domain sequence of any one of SEQ ID NO: 10148, SEQ ID NO: 10184, SEQ ID NO: 10185, SEQ ID NO: 10188, SEQ ID NO: 10209, SEQ ID NO: 10212, SEQ ID NO: 10317, SEQ ID NO: 10318, SEQ ID NO: 10187, SEQ ID NO: 10224, SEQ ID NO: 10292, SEQ ID NO: 10149, SEQ ID NO: 10177, SEQ ID NO: 10151, SEQ ID NO: 10225 or SEQ ID NO: 10509.

[0327] In some embodiments, preferred gRNA molecules are gRNA molecules comprising or consisting of a targeting domain sequence of SEQ ID NO: 10148, 10149, 10206, 10191, 10515, 10203, 10259, 10136, 10314, 10234, 10290, 10233, 10209, 10224, 10212, 10317, 10318, 10225, 10184, 10185, 10188, 10187, 10292, 10151, 10509, 10281, 10299, 10301, or 10177.

[0328] In some embodiments, preferred gRNA molecules are gRNA molecules comprising or consisting of a targeting domain sequence of SEQ ID NO: 10148, 10149, 10290, 10209, 10224, 10212, 10317, 10318, 10225, 10184, 10185, 10188, 10187, 10292, 10151, 10509, 10281, or 10177.

[0329] In some embodiments, preferred gRNA molecules are gRNA molecules comprising or consisting of a targeting domain sequence of SEQ ID NO: 10206, 10191, 10515, 10203, 10259, 10136, 10314, or 10234.

[0330] In some embodiments, preferred gRNA molecules are gRNA molecules comprising or consisting of a targeting domain sequence of SEQ ID NO: 10191, 10203, 10259, 10136, 10314, or 10234.

[0331] In some embodiments, preferred gRNA molecules are gRNA molecules comprising or consisting of a targeting domain sequence of SEQ ID NO: 10148, 10149, or 10206. In some embodiments, preferred gRNA molecules are gRNA molecules comprising or consisting of a targeting domain sequence of SEQ ID NO: 10148. In some embodiments, preferred gRNA molecules are gRNA molecules comprising or consisting of a targeting domain sequence of SEQ ID NO: 10149. In some embodiments, preferred gRNA molecules are gRNA molecules comprising or consisting of a targeting domain sequence of SEQ ID NO: 10206.

[0332] In an aspect, the disclosure further provides for compositions useful for directing gene editing systems, e.g., a CRISPR system, zinc finger nuclease system, TALEN system, or meganuclease system, to a target sequence of a TET2 intron or TET2 intron-exon junction. In embodiments, the gene editing system further comprises a template nucleic acid, for example, for insertion of heterologous nucleic acid sequence (e.g., sequence encoding a CAR, e.g., as described herein) at or near the target locus. In an aspect, the gene editing system is a CRISPR system comprising a gRNA molecule comprising a targeting domain sequence complementary to a target sequence of a TET2 intron or TET2 intron-exon junction. In embodiments involving a CRISPR system, the gRNA molecule comprises a targeting domain sequence complementary to a target sequence adjacent to a PAM recognition sequence of the Cas molecule (e.g., Cas9 molecule) of the CRISPR system. Table 3 provides the genomic locations of the human TET2 introns according to hg38. In an aspect, the gene editing system, e.g., CRISPR system, creates a break (e.g., single or double-strand break) at a sequence (e.g., between two nucleotides) between the start nucleotide and the end nucleotide of an intron listed in Table 3. In one preferred aspect, the gene editing system, e.g., CRISPR system, creates a break (e.g., single or double-strand break) at a sequence (e.g., between two nucleotides) between the start nucleotide and the end nucleotide of the intron between exon 9 and exon 10 of Table 3 (e.g., at a position between ch4: 105269748 and ch4: 105272563 according to hg38).

TABLE 3
Human TET2 intron start nucleotide and end nucleotide
genomic coordinates (according to hg38)

| | Start | End | |
|---|---|---|---|
| Chromosome | Nucleotide | Nucleotide | Intron |
| chr4 | 105146980 | 105190359 | intron between exon 1 and exon 2 |
| chr4 | 105190506 | 105233896 | intron between exon 2 and exon 3 |
| chr4 | 105237352 | 105241338 | intron between exon 3 and exon 4 |
| chr4 | 105241430 | 105242833 | intron between exon 4 and exon 5 |
| chr4 | 105242928 | 105243569 | intron between exon 5 and exon 6 |
| chr4 | 105243779 | 105259618 | intron between exon 6 and exon 7 |
| chr4 | 105259770 | 105261758 | intron between exon 7 and exon 8 |
| chr4 | 105261849 | 105269609 | intron between exon 8 and exon 9 |
| chr4 | 105269748 | 105272563 | intron between exon 9 and exon 10 |
| chr4 | 105272919 | 105275047 | intron between exon 10 and exon 11 |

III. Methods for Designing gRNAs

[0333] Methods for designing gRNAs are described herein, including methods for selecting, designing and validating target sequences. Exemplary targeting domains are also provided herein. Targeting Domains discussed herein can be incorporated into the gRNAs described herein.

[0334] Methods for selection and validation of target sequences as well as off-target analyses are described, e.g., in. Mali el al., 2013 SCIENCE 339 (6121): 823-826; Hsu et al., 2013 NAT BIOTECHNOL, 31 (9): 827-32; Fu et al., 2014 NAT BIOTECHNOL, doi: 10.1038/nbt.2808. PubMed PM ID: 24463574; Heigwer et al., 2014 NAT METHODS 11 (2): 122-3. doi: 10.1038/nmeth.2812. PubMed PMID: 24481216; Bae el al, 2014 BIOINFORMATICS PubMed PMID: 24463181; Xiao A el al, 2014 BIOINFORMATICS PubMed PMID: 24389662.

[0335] For example, a software tool can be used to optimize the choice of gRNA within a user's target sequence, e.g., to minimize total off-target activity across the genome. Off target activity may be other than cleavage. For each possible gRNA choice e.g., using S. pyogenes Cas9, the tool can identify all off-target sequences (e.g., preceding either NAG or NGG PAMs) across the genome that contain up to certain number (e.g., 1, 2, 3, 4, 5, 6, 7, 8, 9, or 10) of mismatched base-pairs. The cleavage efficiency at each off-target sequence can be predicted, e.g., using an experimentally-derived weighting scheme. Each possible gRNA is then ranked according to its total predicted off-target cleavage; the top-ranked gRNAs represent those that are likely to have the greatest on-target and the least off-target cleavage. Other functions, e.g., automated reagent design for CRISPR construction, primer design for the on-target Surveyor assay, and primer design for high-throughput detection and quantification of off-target cleavage via next-gen sequencing, can also be included in the tool. Candidate gRNA molecules can be evaluated by art-known methods or as described herein.

[0336] Although software algorithms may be used to generate an initial list of potential gRNA molecules, cutting efficiency and specificity will not necessarily reflect the predicted values, and gRNA molecules typically require screening in specific cell lines, e.g., primary human cell lines, e.g., primary human immune effector cells, e.g., primary human T cells, to determine, for example, cutting efficiency, indel formation, cutting specificity and change in desired phenotype. These properties may be assayed by the methods described herein.

### IV. Cas Molecules

[0337] In some embodiments, the Cas molecule is a Class 1 Cas nuclease. In some embodiments, the Cas molecule is a Class 2 Cas nuclease. See, e.g., Makarova et al. (2015), Nat Rev Microbiol, 13 (11): 722-36; Shmakov et al. (2015), Molecular Cell, 60:385-397. A Class 2 Cas molecule may be a single-protein endonuclease. In some embodiments, the Class 2 Cas molecule is from a Type II, V, or VI CRISPR/Cas system and may be a single-protein endonuclease. Non-limiting examples of Class 2 Cas molecules include Cas9, Cpf1, C2c1, C2c2, and C2c3 proteins. See, e.g., Yang et al. (2016), Cell, 167 (7): 1814-28; Zetsche et al. (2015), Cell, 163:1-13. In some embodiments, the Cas molecule is a Cpf1 molecule. Cpf1 may be homologous to Cas9 and contain a RuvC-like nuclease domain. See, e.g., Zetsche et al. (2015), the Cpf1 sequences of which are incorporated by reference in their entirety.

### Cas9 Molecules

[0338] In some embodiments, the Cas molecule is a Cas9 molecule or fragment or variant, e.g., catalytic or non-catalytic variant, thereof. Cas9 molecules of a variety of species can be used in the methods and compositions described herein. While the S. pyogenes Cas9 molecule are the subject of much of the disclosure herein, Cas9 molecules of, derived from, or based on the Cas9 proteins of other species listed herein can be used as well. In other words, other Cas9 molecules, e.g., S. thermophilus, Staphylococcus aureus and/or Neisseria meningitidis Cas9 molecules, may be used in the systems, methods and compositions described herein.

[0339] In some embodiments, the Cas9 molecule is a high-fidelity variant harboring alterations designed to reduce non-specific DNA contacts. See, e.g., Kleinstiver et al. (2016), Nature 529 (7587): 490-95; Slaymaker et al. (2016), Science, 351 (6268): 84-88; Tsai et al. (2014), Nat. Biotech. 32:569-577. In some embodiments, the high-fidelity Cas9 retains on-target activities comparable to wild-type Cas9. In some embodiments, the high-fidelity Cas9 reduces off-target activities by at least about 50%, 60%, 70%, 80%, 90%, 95%, or 99% as compared to wild-type Cas9, e.g., as measured by genome-wide break capture and targeted sequencing methods. In some embodiments, the high-fidelity Cas9 renders off-target activities undetectable, e.g., as measured by genome-wide break capture and targeted sequencing methods. In some embodiments, the high-fidelity Cas9 is Streptococcus pyogenes SpCas9-HF1 (Kleinstiver 2016) or Alt-R® S.p. HiFi Cas9 Nuclease 3NLS (IDT).

[0340] Additional Cas9 species include: Acidovorax avenae, Actinobacillus pleuropneumoniae, Actinobacillus succinogenes, Actinobacillus suis, Actinomyces sp., Cycliphilus denitrificans, Aminomonas paucivorans, Bacillus cereus, Bacillus smithii, Bacillus thuringiensis, Bacteroides sp., Blastopirellula marina, Bradyrhiz obium sp., Brevibacillus latemsporus, Campylobacter coli, Campylobacter jejuni, Campylobacter lad, Candidatus Puniceispirillum, Clostridiu cellulolyticum, Clostridium perfringens, Corynebacterium accolens, Corynebacterium diphtheria, Corynebacterium matruchotii, Dinoroseobacter sliibae, Eubacterium dolichum, gamma proteobacterium, Gluconacetobacler diazotrophicus, Haemophilus parainfluenzae, Haemophilus sputorum, Helicobacter canadensis, Helicobacter cinaedi, Helicobacter mustelae, Ilyobacler polytropus, Kingella kingae, Lactobacillus crispatus, Listeria ivanovii, Listeria monocytogenes, Listeriaceae bacterium, Methylocystis sp., Methylosinus trichosporium, Mobiluncus mulieris, Neisseria bacilliformis, Neisseria cinerea, Neisseria flavescens, Neisseria lactamica. Neisseria sp., Neisseria wadsworthii, Nitrosomonas sp., Parvibaculum lavamentivorans, Pasteurella multocida, Phascolarctobacterium succinatutens, Ralstonia syzygii, Rhodopseudomonas palustris, Rhodovulum sp., Simonsiella muelleri, Sphingomonas sp., Sporolactobacillus vineae, Staphylococcus lugdunensis, Streptococcus sp., Subdoligranulum sp., Tislrella mobilis, Treponema sp., or Verminephrobacter eiseniae.

[0341] A Cas9 molecule, as that term is used herein, refers to a molecule that can interact with a gRNA molecule (e.g., sequence of a domain of a tracr) and, in concert with the gRNA molecule, localize (e.g., target or home) to a site which comprises a target sequence and PAM sequence.

[0342] In an embodiment, the Cas9 molecule is capable of cleaving a target nucleic acid molecule, which may be referred to herein as an active Cas9 molecule. In an embodiment, an active Cas9 molecule, comprises one or more of the following activities: a nickase activity, i.e., the ability to cleave a single strand, e.g., the non-complementary strand or the complementary strand, of a nucleic acid molecule; a double stranded nuclease activity, i.e., the ability to cleave both strands of a double stranded nucleic acid and create a double stranded break, which in an embodiment is the presence of two nickase activities; an endonuclease activity; an exonuclease activity; and a helicase activity, i.e., the ability to unwind the helical structure of a double stranded nucleic acid.

[0343] In an embodiment, an enzymatically active Cas9 molecule cleaves both DNA strands and results in a double stranded break. In an embodiment, a Cas9 molecule cleaves only one strand, e.g., the strand to which the gRNA hybridizes to, or the strand complementary to the strand the gRNA hybridizes with. In an embodiment, an active Cas9 molecule comprises cleavage activity associated with an HNH-like domain. In an embodiment, an active Cas9 molecule comprises cleavage activity associated with an N-terminal RuvC-like domain. In an embodiment, an active Cas9 molecule comprises cleavage activity associated with an HNH-like domain and cleavage activity associated with an N-terminal RuvC-like domain. In an embodiment, an active Cas9 molecule comprises an active, or cleavage competent, HNH-like domain and an inactive, or cleavage incompetent, N-terminal RuvC-like domain. In an embodiment, an active Cas9 molecule comprises an inactive, or cleavage incompetent, HNH-like domain and an active, or cleavage competent, N-terminal RuvC-like domain.

[0344] In an embodiment, the ability of an active Cas9 molecule to interact with and cleave a target nucleic acid is PAM sequence dependent. A PAM sequence is a sequence in the target nucleic acid. In an embodiment, cleavage of the target nucleic acid occurs upstream from the PAM sequence. Active Cas9 molecules from different bacterial species can recognize different sequence motifs (e.g., PAM sequences). In an embodiment, an active Cas9 molecule of S. pyogenes recognizes the sequence motif NGG and directs cleavage of a target nucleic acid sequence 1 to 10, e.g., 3 to 5, base pairs upstream from that sequence. See, e.g., Mali el al., SCIENCE 2013; 339 (6121): 823-826. In an embodiment, an active Cas9 molecule of S. thermophilus recognizes the sequence motif NGGNG and NNAGAAW (W=A or T) and directs cleavage of a core target nucleic acid sequence 1 to 10, e.g., 3 to 5, base pairs upstream from these sequences. See, e.g., Horvath et al., SCIENCE 2010; 327 (5962): 167-170, and Deveau et al, J BACTERIOL 2008; 190 (4): 1390-1400. In an embodiment, an active Cas9 molecule of S. mutans recognizes the sequence motif NGG or NAAR (R-A or G) and directs cleavage of a core target nucleic acid sequence 1 to 10, e.g., 3 to 5 base pairs, upstream from this sequence. See, e.g., Deveau et al., J BACTERIOL 2008; 190 (4): 1390-1400.

[0345] In an embodiment, an active Cas9 molecule of S. aureus recognizes the sequence motif NNGRR (R=A or G) and directs cleavage of a target nucleic acid sequence 1 to 10, e.g., 3 to 5, base pairs upstream from that sequence. See, e.g., Ran F. et al., NATURE, vol. 520, 2015, pp. 186-191. In an embodiment, an active Cas9 molecule of N. meningitidis recognizes the sequence motif NNNNGATT and directs cleavage of a target nucleic acid sequence 1 to 10, e.g., 3 to 5, base pairs upstream from that sequence. See, e.g., Hou et al., 110 (39): 15644-49 (2013). The ability of a Cas9 molecule to recognize a PAM sequence can be determined, e.g., using a transformation assay described in Jinek et al, SCIENCE 2012, 337:816.

[0346] Some Cas9 molecules have the ability to interact with a gRNA molecule, and in conjunction with the gRNA molecule bind to (e.g., target or localize to) a core target domain, but are incapable of cleaving the target nucleic acid, or incapable of cleaving at efficient rates. Cas9 molecules having no, or no substantial, cleavage activity may be referred to herein as an inactive Cas9 (an enzymatically inactive Cas9), a dead Cas9, or a dCas9 molecule. See, e.g., Gilbert et al. (2013), Cell, 154 (2): 442-51. For example, an inactive Cas9 molecule can lack cleavage activity or have substantially less, e.g., less than 20, 10, 5, 1 or 0.1% of the cleavage activity of a reference Cas9 molecule, as measured by an assay described herein.

[0347] Other Cas molecules, e.g., Cpf1, may also have the ability to interact with a gRNA molecule, and in conjunction with the gRNA molecule bind to (e.g., target or localize to) a core target domain, but may be incapable of cleaving the target nucleic acid, or incapable of cleaving at efficient rates. See, e.g., WO2016/205711A1, incorporated herein by reference. Cpf1 molecules having no, or no substantial, cleavage activity may be referred to herein as an inactive Cpf1 (an enzymatically inactive Cpf1), a dead Cpf1, a dCpf1, a DNase-dead Cpf1, or a ddCpf1 molecule. See, e.g., Zhang et al. (2017), Cell Discov. 3:17018. For example, a ddCpf1 molecule can lack cleavage activity, DNase activity, or have substantially less, e.g., less than 20, 10, 5, 1 or 0.1% of the cleavage activity of a reference Cpf1 molecule, as measured by an assay described herein.

[0348] Exemplary naturally occurring Cas9 molecules that may be used with the methods described herein are described in Chylinski et al, RNA Biology 2013; 10:5, 727-737. Such Cas9 molecules include Cas9 molecules of a cluster 1 bacterial family, cluster 2 bacterial family, cluster 3 bacterial family, cluster 4 bacterial family, cluster 5 bacterial family, cluster 6 bacterial family, a cluster 7 bacterial family, a cluster 8 bacterial family, a cluster 9 bacterial family, a cluster 10 bacterial family, a cluster 1 1 bacterial family, a cluster 12 bacterial family, a cluster 13 bacterial family, a cluster 14 bacterial family, a cluster 1 bacterial family, a cluster 16 bacterial family, a cluster 17 bacterial family, a cluster 1 8 bacterial family, a cluster 19 bacterial family, a cluster 20 bacterial family, a cluster 21 bacterial family, a cluster 22 bacterial family, a cluster 23 bacterial family, a cluster 24 bacterial family, a cluster 25 bacterial family, a cluster 26 bacterial family, a cluster 27 bacterial family, a cluster 28 bacterial family, a cluster 29 bacterial family, a cluster 30 bacterial family, a cluster 31 bacterial family, a cluster 32 bacterial family, a cluster 33 bacterial family, a cluster 34 bacterial family, a cluster 35 bacterial family, a cluster 36 bacterial family, a cluster 37 bacterial family, a cluster 38 bacterial family, a cluster 39 bacterial family, a cluster 40 bacterial family, a cluster 41 bacterial family, a cluster 42 bacterial family, a cluster 43 bacterial family, a cluster 44 bacterial family, a cluster 45 bacterial family, a cluster 46 bacterial family, a cluster 47 bacterial family, a cluster 48 bacterial family, a cluster 49 bacterial family, a cluster 50 bacterial family, a cluster 5 1 bacterial family, a cluster 52 bacterial family, a cluster 53 bacterial family, a cluster 54 bacterial family, a cluster 55 bacterial family, a cluster 56 bacterial family, a cluster 57 bacterial family, a cluster 58 bacterial family, a cluster 59 bacterial family, a cluster 60 bacterial family, a cluster 61 bacterial family, a cluster 62 bacterial family, a cluster 63 bacterial family, a cluster 64 bacterial family, a cluster 65 bacterial family, a cluster 66 bacterial family, a cluster 67 bacterial family, a cluster 68 bacterial family, a cluster 69 bacterial family, a cluster 70 bacterial family, a cluster 71 bacterial family, a cluster 72 bacterial family, a cluster 73 bacterial family, a cluster 74 bacterial family, a cluster 75 bacterial family, a cluster 76 bacterial family, a cluster 77 bacterial family, or a cluster 78 bacterial family.

[0349] Exemplary naturally occurring Cas9 molecules include a Cas9 molecule of a cluster 1 bacterial family. Examples include a Cas9 molecule of: S. pyogenes (e.g., strain SF370, MGAS 10270, MGAS 10750, MGAS2096, MGAS315, MGAS5005, MGAS6180, MGAS9429, NZ131 and SSI-1), S. thermophilus (e.g., strain LMD-9), S. pseudoporcinus (e.g., strain SPIN 20026), S. mutans (e.g., strain UA 159, NN2025), S. macacae (e.g., strain NCTC1 1558), S. gallolylicus (e.g., strain UCN34, ATCC BAA-2069), S. equines (e.g., strain ATCC 9812, MGCS 124), S. dysdalactiae (e.g., strain GGS 124), S. bovis (e.g., strain ATCC 700338), S. anginosus (e.g.; strain F0211), S. agalactia (e.g., strain NEM316, A909), Listeria monocytogenes (e.g., strain F6854), Listeria innocua (L. innocua, e.g., strain Clip 1 1262), EtUerococcus italicus (e.g., strain DSM 15952), or Enterococcus faecium (e.g., strain 1,231, 408). Additional exemplary Cas9 molecules are a Cas9 molecule of Neisseria meningitidis (Hou et al. 110 (39): 15644-49 (2013)) and a S. aureus Cas9 molecule.

[0350] In an embodiment, a Cas9 molecule, e.g., an active Cas9 molecule or inactive Cas9 molecule, comprises an amino acid sequence: having 60%, 65%, 70%, 75%, 80%, 85%, 90%, 95%, 96%, 97%, 98%, or 99% homology with; differs at no more than 1%, 2%, 5%, 10%, 15%, 20%, 30%, or 40% of the amino acid residues when compared with; differs by at least 1, 2, 5, 10 or 20 amino acids but by no more than 100, 80, 70, 60, 50, 40 or 30 amino acids from; or is identical to; any Cas9 molecule sequence described herein or a naturally occurring Cas9 molecule sequence, e.g., a Cas9 molecule from a species listed herein or described in Chylinski et al., RNA Biology 2013, 10:5, 121-T, 1 Hou et al. 110 (39): 15644-49 (2013).

[0351] In an embodiment, a Cas9 molecule comprises an amino acid sequence having 60%, 65%, 70%, 75%, 80%, 85%, 90%, 95%, 96%, 97%, 98%, or 99% homology with; differs at no more than 1%, 2%, 5%, 10%, 15%, 20%, 30%, or 40% of the amino acid residues when compared with; differs by at least 1, 2, 5, 10 or 20 amino acids but by no more than 100, 80, 70, 60, 50, 40 or 30 amino acids from; or is identical to; S. pyogenes Cas9:

```
(SEQ ID NO: 90)
[sequence omitted]
                                1365
```

[0352] In embodiments, the Cas9 molecule is a S. pyogenes Cas9 variant of SEQ ID NO: 90 that includes one or more mutations to positively charged amino acids (e.g., lysine, arginine or histidine) that introduce an uncharged or nonpolar amino acid, e.g., alanine, at said position. In embodiments, the mutation is to one or more positively charged amino acids in the nt-groove of Cas9. In embodiments, the Cas9 molecule is a S. pyogenes Cas9 variant of SEQ ID NO: 90 that includes a mutation at position 855 of SEQ ID NO: 90, for example a mutation to an uncharged amino acid, e.g., alanine, at position 855 of SEQ ID NO: 90. In embodiments, the Cas9 molecule has a mutation only at position 855 of SEQ ID NO: 90, relative to SEQ ID NO: 90, e.g., to an uncharged amino acid, e.g., alanine. In embodiments, the Cas9 molecule is a S. pyogenes Cas9 variant of SEQ ID NO: 90 that includes a mutation at position 810, a mutation at position 1003, and/or a mutation at position 1060 of SEQ ID NO: 90, for example a mutation to alanine at position 810, position 1003, and/or position 1060 of SEQ ID NO: 90. In embodiments, the Cas9 molecule has a mutation only at position 810, position 1003, and position 1060 of SEQ ID NO: 90, relative to SEQ ID NO: 90, e.g., where each mutation is to an uncharged amino acid, for example, alanine. In embodiments, the Cas9 molecule is a S. pyogenes Cas9 variant of SEQ ID NO: 90 that includes a mutation at position 848, a mutation at position 1003, and/or a mutation at position 1060 of SEQ ID NO: 90, for example a mutation to alanine at position 848, position 1003, and/or position 1060 of SEQ ID NO: 90. In embodiments, the Cas9 molecule has a mutation only at position 848, position 1003, and position 1060 of SEQ ID NO: 90, relative to SEQ ID NO: 90, e.g., where each mutation is to an uncharged amino acid, for example, alanine. In embodiments, the Cas9 molecule is a Cas9 molecule as described in Slaymaker et al., Science Express, available online Dec. 1, 2015 at Science DOI: 10.1126/science.aad5227.

[0353] In embodiments, the Cas9 molecule is a S. pyogenes Cas9 variant of SEQ ID NO: 90 that includes one or more mutations. In embodiments, the Cas9 variant comprises a mutation at position 80 of SEQ ID NO: 90, e.g., includes a leucine at position 80 of SEQ ID NO: 90 (i.e., comprises or consists of, SEQ ID NO: 90 with a C80L mutation). In embodiments, the Cas9 variant comprises a mutation at position 574 of SEQ ID NO: 90, e.g., includes a glutamic acid at position 574 of SEQ ID NO: 90 (i.e., comprises or consists of, SEQ ID NO: 90 with a C574E mutation). In embodiments, the Cas9 variant comprises a mutation at position 80 and a mutation at position 574 of SEQ ID NO: 90, e.g., includes a leucine at position 80 of SEQ ID NO: 90, and a glutamic acid at position 574 of SEQ ID NO: 90 (i.e., comprises or consists of, SEQ ID NO: 90 with a C80L mutation and a C574E mutation). Without being bound by theory, it is believed that such mutations improve the solution properties of the Cas9 molecule.

[0354] In embodiments, the Cas9 molecule is a S. pyogenes Cas9 variant of SEQ ID NO: 90 that includes one or more mutations. In embodiments, the Cas9 variant comprises a mutation at position 147 of SEQ ID NO: 90, e.g., includes a tyrosine at position 147 of SEQ ID NO: 90 (i.e., comprises or consists of, SEQ ID NO: 90 with a D147Y mutation). In embodiments, the Cas9 variant comprises a mutation at position 411 of SEQ ID NO: 90, e.g., includes a threonine at position 411 of SEQ ID NO: 90 (i.e., comprises or consists of, SEQ ID NO: 90 with a P411T mutation). In embodiments, the Cas9 variant comprises a mutation at position 147 and a mutation at position 411 of SEQ ID NO: 90, e.g., includes a tyrosine at position 147 of SEQ ID NO: 90, and a threonine at position 411 of SEQ ID NO: 90 (i.e., comprises or consists of, SEQ ID NO: 90 with a D147Y mutation and a P411T mutation). Without being bound by theory, it is believed that such mutations improve the targeting efficiency of the Cas9 molecule, e.g., in yeast.

[0355] In embodiments, the Cas9 molecule is a S. pyogenes Cas9 variant of SEQ ID NO: 90 that includes one or more mutations. In embodiments, the Cas9 variant comprises a mutation at position 1135 of SEQ ID NO: 90, e.g., includes a glutamic acid at position 1135 of SEQ ID NO: 90 (i.e., comprises or consists of, SEQ ID NO: 90 with a D1135E mutation). Without being bound by theory, it is believed that such mutations improve the selectivity of the Cas9 molecule for the NGG PAM sequence versus the NAG PAM sequence.

[0356] In embodiments, the Cas9 molecule is a S. pyogenes Cas9 variant of SEQ ID NO: 90 that includes one or more mutations that introduce an uncharged or nonpolar amino acid, e.g., alanine, at certain positions. In embodiments, the Cas9 molecule is a S. pyogenes Cas9 variant of SEQ ID NO: 90 that includes a mutation at position 497, a mutation at position 661, a mutation at position 695 and/or a mutation at position 926 of SEQ ID NO: 90, for example a mutation to alanine at position 497, position 661, position 695 and/or position 926 of SEQ ID NO: 90. In embodiments, the Cas9 molecule has a mutation only at position 497, position 661, position 695, and position 926 of SEQ ID NO: 90, relative to SEQ ID NO: 90, e.g., where each mutation is to an uncharged amino acid, for example, alanine. Without being bound by theory, it is believed that such mutations reduce the cutting by the Cas9 molecule at off-target sites

It will be understood that the mutations described herein to the Cas9 molecule may be combined, and may be combined with any of the fusions or other modifications described herein, and the Cas9 molecule may be tested in any of the assays described herein.

[0357] Various types of Cas molecules can be used herein. In some embodiments, Cas molecules of Type II Cas systems are used. In other embodiments, Cas molecules of other Cas systems are used. For example, Type I or Type III Cas molecules may be used. Exemplary Cas molecules (and Cas systems) are described, e.g., in Haft et al., PLOS COMPUTATIONAL BIOLOGY 2005, 1 (6): e60 and Makarova et al., NATURE REVIEW MICROBIOLOGY 2011, 9:467-477, the contents of both references are incorporated herein by reference in their entirety.

[0358] In an embodiment, a Cas or Cas9 molecule used in the methods disclosed herein comprises one or more of the following activities: a nickase activity; a double stranded cleavage activity (e.g., an endonuclease and/or exonuclease activity); a helicase activity; or the′ ability, together with a gRNA molecule, to localize to a target nucleic acid.

### Altered Cas9 Molecules

[0359] Naturally occurring Cas9 molecules may possess a number of properties, including: nickase activity, nuclease activity (e.g., endonuclease and/or exonuclease activity); helicase activity; the ability to associate functionally with a gRNA molecule; and the ability to target (or localize to) a site on a nucleic acid (e.g., PAM recognition and specificity). In an embodiment, a Cas9 molecule used with the methods disclosed herein can include all or a subset of these properties. In typical embodiments, Cas9 molecules have the ability to interact with a gRNA molecule and, in concert with the gRNA molecule, localize to a site in a nucleic acid. Other activities, e.g., PAM specificity, cleavage activity, or helicase activity can vary more widely in Cas9 molecules.

[0360] Cas9 molecules with desired properties can be made in a number of ways, e.g., by alteration of a parental, e.g., naturally occurring Cas9 molecule to provide an altered Cas9 molecule having a desired property. For example, one or more mutations or differences relative to a parental Cas9 molecule can be introduced. Such mutations and differences may comprise: substitutions (e.g., conservative substitutions or substitutions of non-essential amino acids); insertions; or deletions. In an embodiment, a Cas9 molecule can comprises one or more mutations or differences, e.g., at least 1, 2, 3, 4, 5, 10, 15, 20, 30, 40 or 50 mutations but less than 200, 100, or 80 mutations relative to a reference Cas9 molecule while retaining or enhancing one or more activities of the reference Cas9 molecule.

[0361] In an embodiment, a mutation or mutations do not have a substantial effect on a Cas9 activity, e.g. a Cas9 activity described herein. In an embodiment, a mutation or mutations have a substantial effect on a Cas9 activity, e.g. a Cas9 activity described herein. In an embodiment, exemplary activities comprise one or more of PAM specificity, cleavage activity, and helicase activity. A mutation(s) can be present, e.g., in: one or more RuvC-like domain, e.g., an N-terminal RuvC-like domain; an HNH-like domain; a region outside the RuvC-like domains and the HNH-like domain. In some embodiments, a mutation(s) is present in an N-terminal RuvC-like domain. In some embodiments, a mutation(s) is present in an HNH-like domain. In some embodiments, mutations are present in both an N-terminal RuvC-like domain and an HNH-like domain.

[0362] Whether or not a particular sequence, e.g., a substitution, may affect one or more activity, such as targeting activity, cleavage activity, etc., can be evaluated or predicted by, e.g., evaluating whether the mutation is conservative or by the method described in Section III. In an embodiment, a “non-essential” amino acid residue, as used in the context of a Cas9 molecule, is a residue that can be altered from the wild-type sequence of a Cas9 molecule, e.g., a naturally occurring Cas9 molecule, e.g., an active Cas9 molecule, without abolishing or more preferably, without substantially altering a Cas9 activity (e.g., cleavage activity), whereas changing an “essential” amino acid residue results in a substantial loss of activity (e.g., cleavage activity).

Cas9 Molecules with Altered PAM Recognition or No PAM Recognition

[0363] Naturally occurring Cas9 molecules may recognize specific PAM sequences, for example the PAM recognition sequences described above for S. pyogenes, S. thermophilus, S. mutans, S. aureus and N. meningitidis.

[0364] In an embodiment, a Cas9 molecule has the same PAM specificities as a naturally occurring Cas9 molecule. In other embodiments, a Cas9 molecule has a PAM specificity not associated with a naturally occurring Cas9 molecule, or a PAM specificity not associated with the naturally occurring Cas9 molecule to which it has the closest sequence homology. For example, a naturally occurring Cas9 molecule can be altered, e.g., to alter PAM recognition, e.g., to alter the PAM sequence that the Cas9 molecule recognizes to decrease off target sites and/or improve specificity; or eliminate a PAM recognition requirement. In an embodiment, a Cas9 molecule can be altered, e.g., to increase length of PAM recognition sequence and/or improve Cas9 specificity to high level of identity to decrease off target sites and increase specificity. In an embodiment, the length of the PAM recognition sequence is at least 4, 5, 6, 7, 8, 9, 10 or 15 amino acids in length. Cas9 molecules that recognize different PAM sequences and/or have reduced off-target activity can be generated using directed evolution. Exemplary methods and systems that can be used for directed evolution of Cas9 molecules are described, e.g., in Esvelt el al, Nature 2011, 472 (7344): 499-503. Candidate Cas9 molecules can be evaluated, e.g., by methods described herein.

### Non-Cleaving and Modified-Cleavage Cas9 Molecules

[0365] In an embodiment, a Cas9 molecule comprises a cleavage property that differs from a naturally occurring Cas9 molecule, e.g., that differs from the naturally occurring Cas9 molecule having the closest homology. For example, a Cas9 molecule can differ from naturally occurring Cas9 molecules, e.g., a Cas9 molecule of S. pyogenes, as follows: its ability to modulate, e.g., decreased or increased, cleavage of a double stranded break (endonuclease and/or exonuclease activity), e.g., as compared to a naturally occurring Cas9 molecule (e.g., a Cas9 molecule of S. pyogenes); its ability to modulate, e.g., decreased or increased, cleavage of a single strand of a nucleic acid, e.g., a non-complementary strand of a nucleic acid molecule or a complementary strand of a nucleic acid molecule (nickase activity), e.g., as compared to a naturally occurring Cas9 molecule (e.g., a Cas9 molecule of S. pyogenes); or the ability to cleave a nucleic acid molecule, e.g., a double stranded or single stranded nucleic acid molecule, can be eliminated.

### Modified Cleavage Active Cas9 Molecules

[0366] In an embodiment, an active Cas9 molecule comprises one or more of the following activities: cleavage activity associated with an N-terminal RuvC-like domain; cleavage activity associated with an HNH-like domain; cleavage activity associated with an HNH domain and cleavage activity associated with an N-terminal RuvC-like domain.

[0367] In an embodiment, the Cas9 molecule is a Cas9 nickase, e.g., cleaves only a single strand of DNA. In some embodiments, the Cas9 nickase comprises a RuvC-like domain that is capable of cleavage and a HNH-like domain that has reduced cleavage capability or is incapable of cleavage. In alternate embodiments, the Cas9 nickase comprises a HNH-like domain that is capable of cleavage and a RuvC-like domain that has reduced cleavage capability or is incapable of cleavage. In an embodiment, the Cas9 nickase includes a mutation at position 10 and/or a mutation at position 840 of SEQ ID NO: 90, e.g., comprises a D10A and/or H840A mutation to SEQ ID NO: 90.

### Non-Cleaving Inactive Cas9 Molecules

[0368] In an embodiment, the altered Cas9 molecule is an inactive Cas9 molecule which does not cleave a nucleic acid molecule (either double stranded or single stranded nucleic acid molecules) or cleaves a nucleic acid molecule with significantly less efficiency, e.g., less than 20, 10, 5, 1 or 0.1% of the cleavage activity of a reference Cas9 molecule, e.g., as measured by an assay described herein. The reference Cas9 molecule can by a naturally occurring unmodified Cas9 molecule, e.g., a naturally occurring Cas9 molecule such as a Cas9 molecule of S. pyogenes, S. thermophilus, S. aureus or N. meningitidis. In an embodiment, the reference Cas9 molecule is the naturally occurring Cas9 molecule having the closest sequence identity or homology. In an embodiment, the inactive Cas9 molecule lacks substantial cleavage activity associated with an N-terminal RuvC-like domain and cleavage activity associated with an HNH-like domain.

[0369] In an embodiment, the Cas9 molecule is dCas9. See, e.g., Tsai et al. (2014), Nat. Biotech. 32:569-577.

[0370] A catalytically inactive Cas9 molecule may be fused with a transcription repressor. An inactive Cas9 fusion protein complexes with a gRNA and localizes to a DNA sequence specified by gRNA's targeting domain, but, unlike an active Cas9, it will not cleave the target DNA. Fusion of an effector domain, such as a transcriptional repression domain, to an inactive Cas9 enables recruitment of the effector to any DNA site specified by the gRNA. Site specific targeting of a Cas9 fusion protein to a promoter region of a gene can block or affect polymerase binding to the promoter region, for example, a Cas9 fusion with a transcription factor (e.g., a transcription activator) and/or a transcriptional enhancer binding to the nucleic acid to increase or inhibit transcription activation. Alternatively, site specific targeting of a Cas9-fusion to a transcription repressor to a promoter region of a gene can be used to decrease transcription activation.

[0371] Transcription repressors or transcription repressor domains that may be fused to an inactive Cas9 molecule can include ruppel associated box (KRAB or SKD), the Mad mSIN3 interaction domain (SID) or the ERF repressor domain (ERD).

[0372] In another embodiment, an inactive Cas9 molecule may be fused with a protein that modifies chromatin. For example, an inactive Cas9 molecule may be fused to heterochromatin protein 1 (HP1), a histone lysine methyltransferase (e.g., SUV39H 1, SUV39H2, G9A, ESET/SETDB 1, Pr-SET7/8, SUV4-20H 1, RIZ1), a histone lysine demethylates (e.g., LSD1/BHC1 10, SpLsdl/Sw, 1/Safl 10, Su (var) 3-3, JMJD2A/JHDM3A, JMJD2B, JMJD2C/GASC1, JMJD2D, Rph 1, JARID 1 A/RBP2, JARI DIB/PLU-I, JARID 1C/SMCX, JARID1 D/SMCY, Lid, Jhn2, Jmj2), a histone lysine deacetylases (e.g., HDAC1, HDAC2, HDAC3, HDAC8, Rpd3, Hos 1, Cir6, HDAC4, HDAC5, HDAC7, HDAC9, Hdal, Cir3, SIRT 1, SIRT2, Sir2, Hst 1, Hst2, Hst3, Hst4, HDAC 11) and a DNA methylases (DNMT1, DNMT2a/DMNT3b, MET1). An inactive Cas9-chromatin modifying molecule fusion protein can be used to alter chromatin status to reduce expression a target gene.

[0373] The heterologous sequence (e.g., the transcription repressor domain) may be fused to the N- or C-terminus of the inactive Cas9 protein. In an alternative embodiment, the heterologous sequence (e.g., the transcription repressor domain) may be fused to an internal portion (i.e., a portion other than the N-terminus or C-terminus) of the inactive Cas9 protein.

[0374] The ability of a Cas9 molecule/gRNA molecule complex to bind to and cleave a target nucleic acid can be evaluated, e.g., by the methods described herein in Section III. The activity of a Cas9 molecule, e.g., either an active Cas9 or an inactive Cas9, alone or in a complex with a gRNA molecule may also be evaluated by methods well-known in the art, including, gene expression assays and chromatin-based assays, e.g., chromatin immunoprecipitation (ChiP) and chromatin in vivo assay (CiA).

### Other Molecules

[0375] In embodiments, the Cas molecule, e.g., a Cas9 of S. pyogenes, may comprise one or more amino acid sequences that confer additional activity. Non-limiting examples include one or more of a nuclear localization signal or sequence, a mitochondrial localization signal, a chloroplast localization signal, a endoplasmic reticulum (ER) retention signal, a tag or a marker (e.g., a histidine tag or a fluorescent protein), or a larger polypeptide, e.g., an enzyme, a transcription factor, or a functional portion thereof (see, e.g., Maeder et al., 2013; Perez-Piniera et al., 2013; Gilbert et al., 2013; Guilinger et al., 2014).

[0376] In some aspects, the Cas9 molecule may comprise one or more nuclear localization sequences (NLSs), such as at least 1, 2, 3, 4, 5, 6, 7, 8, 9, 10, or more NLSs. In some embodiments, the Cas9 molecule comprises at least 1, 2, 3, 4, 5, 6, 7, 8, 9, 10, or more NLSs at or near the amino-terminus, at least 1, 2, 3, 4, 5, 6, 7, 8, 9, 10, or more NLSs at or near the carboxy-terminus, or a combination of these (e.g. one or more NLS at the amino-terminus and one or more NLS at the carboxy terminus). When more than one NLS is present, each may be selected independently of the others, such that a single NLS may be present in more than one copy and/or in combination with one or more other NLSs present in one or more copies. In some embodiments, an NLS is considered near the N- or C-terminus when the nearest amino acid of the NLS is within about 1, 2, 3, 4, 5, 10, 15, 20, 25, 30, 40, 50, or more amino acids along the polypeptide chain from the N- or C-terminus. Typically, an NLS consists of one or more short sequences of positively charged lysines or arginines exposed on the protein surface, but other types of NLS are known. Non-limiting examples of NLSs include an NLS sequence comprising or derived from: the NLS of the SV40 virus large T-antigen, having the amino acid sequence PKKKRKV (SEQ ID NO: 91); the NLS from nucleoplasmin (e.g. the nucleoplasmin bipartite NLS with the sequence KRPAATKKAGQAKKKK (SEQ ID NO: 92); the c-myc NLS having the amino acid sequence PAAKRVKLD (SEQ ID NO: 93) or RQRRNELKRSP (SEQ ID NO: 94); the hRNPA1 M9 NLS having the sequence NQSSNFGPMKGGNFGGRSSGPYGGGGQYFAKPRNQGGY (SEQ ID NO: 95); the sequence RMRIZFKNKGKDTAELRRRRVEVSVELRKAKKDEQILKRRNV (SEQ ID NO: 96) of the IBB domain from importin-alpha; the sequences VSRKRPRP (SEQ ID NO: 97) and PPKKARED (SEQ ID NO: 98) of the myoma T protein; the sequence PQPKKKPL (SEQ ID NO: 99) of human p53; the sequence SALIKKKKKMAP (SEQ ID NO: 100) of mouse c-ab 1 IV; the sequences DRLRR (SEQ ID NO: 101) and PKQKKRK (SEQ ID NO: 102) of the influenza virus NS1; the sequence RKLKKKIKKL (SEQ ID NO: 103) of the Hepatitis virus delta antigen; the sequence REKKKFLKRR (SEQ ID NO: 104) of the mouse Mx1 protein; the sequence KRKGDEVDGVDEVAKKKSKK (SEQ ID NO: 105) of the human poly(ADP-ribose) polymerase; and the sequence RKCLQAGMNLEARKTKK (SEQ ID NO: 106) of the steroid hormone receptors (human) glucocorticoid. Other suitable NLS sequences are known in the art (e.g., Sorokin, Biochemistry (Moscow) (2007) 72:13, 1439-1457; Lange J Biol Chem. (2007) 282:8, 5101-5).

[0377] In some aspects, the Cas9 molecule may comprise one or more amino acid sequences that allow the Cas9 molecule to be specifically recognized, for example a tag. In one embodiment, the tag is a Histidine tag, e.g., a histidine tag comprising at least 3, 4, 5, 6, 7, 8, 9, 10 or more histidine amino acids (SEQ ID NO: 107). In embodiments, the histidine tag is a His6 tag (six histidines) (SEQ ID NO: 108). In other embodiments, the histidine tag is a His8 tag (eight histidines) (SEQ ID NO: 109). In embodiments, the histidine tag may be separated from one or more other portions of the Cas9 molecule by a linker. In embodiments, the linker is GGS or a repeat of two or more GGS sequences. An example of such a fusion is the Cas9 molecule iProt106520.

[0378] In some aspects, the Cas9 molecule may comprise one or more amino acid sequences that are recognized by a protease (e.g., comprise a protease cleavage site). In embodiments, the cleavage site is the tobacco etch virus (TEV) cleavage site, e.g., comprises the sequence ENLYFQG (SEQ ID NO: 110). In some aspects the protease cleavage site, e.g., the TEV cleavage site is disposed between a tag, e.g., a His tag, e.g., a His6 (SEQ ID NO: 108) or His8 tag (SEQ ID NO: 109), and the remainder of the Cas9 molecule. Without being bound by theory it is believed that such introduction will allow for the use of the tag for, e.g., purification of the Cas9 molecule, and then subsequent cleavage so the tag does not interfere with the Cas9 molecule function.

[0379] In embodiments, the Cas9 molecule (e.g., a Cas9 molecule as described herein) comprises an N-terminal NLS, and a C-terminal NLS (e.g., comprises, from N- to C-terminal NLS-Cas9-NLS), e.g., wherein each NLS is an SV40 NLS (PKKKRKV (SEQ ID NO: 91)). In embodiments, the Cas9 molecule (e.g., a Cas9 molecule as described herein) comprises an N-terminal NLS, a C-terminal NLS, and a C-terminal His6 tag (SEQ ID NO: 108) (e.g., comprises, from N- to C-terminal NLS-Cas9-NLS-His tag), e.g., wherein each NLS is an SV40 NLS (PKKKRKV (SEQ ID NO: 91)). In embodiments, the Cas9 molecule (e.g., a Cas9 molecule as described herein) comprises an N-terminal His tag (e.g., His6 tag (SEQ ID NO: 108)), an N-terminal NLS, and a C-terminal NLS (e.g., comprises, from N- to C-terminal His tag-NLS-Cas9-NLS), e.g., wherein each NLS is an SV40 NLS (PKKKRKV (SEQ ID NO: 91)). In embodiments, the Cas9 molecule (e.g., a Cas9 molecule as described herein) comprises an N-terminal NLS and a C-terminal His tag (e.g., His6 tag (SEQ ID NO: 108)) (e.g., comprises from N- to C-terminal His tag-Cas9-NLS), e.g., wherein the NLS is an SV40 NLS (PKKKRKV (SEQ ID NO: 91)). In embodiments, the Cas9 molecule (e.g., a Cas9 molecule as described herein) comprises an N-terminal His tag (e.g., His6 tag (SEQ ID NO: 108)) and a C-terminal NLS (e.g., comprises from N- to C-terminal NLS-Cas9-His tag), e.g., wherein the NLS is an SV40 NLS (PKKKRKV (SEQ ID NO: 91)). In embodiments, the Cas9 molecule (e.g., a Cas9 molecule as described herein) comprises an N-terminal His tag (e.g., His8 tag (SEQ ID NO: 109)), an N-terminal cleavage domain (e.g., a tobacco etch virus (TEV) cleavage domain (e.g., comprises the sequence ENLYFQG (SEQ ID NO: 110))), an N-terminal NLS (e.g., an SV40 NLS; SEQ ID NO: 91), and a C-terminal NLS (e.g., an SV40 NLS; SEQ ID NO: 91) (e.g., comprises from N- to C-terminal His tag-TEV-NLS-Cas9-NLS). In any of the aforementioned embodiments the Cas9 has the sequence of SEQ ID NO: 90. Alternatively, in any of the aforementioned embodiments, the Cas9 has a sequence of a Cas9 variant of SEQ ID NO: 90, e.g., as described herein. In any of the aforementioned embodiments, the Cas9 molecule comprises a linker between the His tag and another portion of the molecule, e.g., a GGS linker. Amino acid sequences of exemplary Cas9 molecules described above are provided below. In some embodiments, a Cas9 molecule comprises an amino sequence having at least about 60%, 65%, 70%, 75%, 80%, 85%, 90%, 95%, 96%, 97%, 98%, or 99% homology with; differs at no more than 1%, 2%, 5%, 10%, 15%, 20%, 30%, or 40% of the amino acid residues when compared with; differs by at least 1, 2, 5, 10 or 20 amino acids but by no more than 100, 80, 70, 60, 50, 40 or 30 amino acids from; or is identical to to a Cas9 sequence provided herein, e.g., SEQ ID NO: 90, SEQ ID NO: 111, SEQ ID NO: 112, SEQ ID NO: 113, SEQ ID NO: 114, SEQ ID NO: 115, SEQ ID NO: 116, SEQ ID NO: 117, SEQ ID NO: 118, SEQ ID NO: 119, SEQ ID NO: 120, SEQ ID NO: 121, or SEQ ID NO: 123. “iProt” identifiers match those in FIG. 1.

iProt105026 (also referred to as iProt106154, iProt106331, iProt106545, and
PID426303, depending on the preparation of the protein) (SEQ ID NO: 111):
MAPKKKRKVD KKYSIGLDIG TNSVGWAVIT DEYKVPSKKF KVLGNTDRHS IKKNLIGALL
FDSGETAEAT RLKRTARRRY TRRKNRICYL QEIFSNEMAK VDDSFFHRLE ESFLVEEDKK
HERHPIFGNI VDEVAYHEKY PTIYHLRKKL VDSTDKADLR LIYLALAHMI KFRGHFLIEG
DLNPDNSDVD KLFIQLVQTY NQLFEENPIN ASGVDAKAIL SARLSKSRRL ENLIAQLPGE
KKNGLFGNLI ALSLGLTPNF KSNFDLAEDA KLQLSKDTYD DDLDNLLAQI GDQYADLFLA
AKNLSDAILL SDILRVNTEI TKAPLSASMI KRYDEHHQDL TLLKALVRQQ LPEKYKEIFF
DQSKNGYAGY IDGGASQEEF YKFIKPILEK MDGTEELLVK LNREDLLRKQ RTFDNGSIPH
QIHLGELHAI LRRQEDFYPF LKDNREKIEK ILTFRIPYYV GPLARGNSRF AWMTRKSEET
ITPWNFEEVV DKGASAQSFI ERMTNEDKNL PNEKVLPKHS LLYEYFTVYN ELTKVKYVTE
GMRKPAFLSG EQKKAIVDLL FKTNRKVTVK QLKEDYFKKI ECFDSVEISG VEDRFNASLG
TYHDLLKIIK DKDFLDNEEN EDILEDIVLT LTLFEDREMI EERLKTYAHL FDDKVMKQLK
RRRYTGWGRL SRKLINGIRD KQSGKTILDF LKSDGFANRN FMQLIHDDSL TFKEDIQKAQ
VSGQGDSLHE HIANLAGSPA IKKGILQTVK VVDELVKVMG RHKPENIVIE MARENQTTQK
GQKNSRERMK RIEEGIKELG SQILKEHPVE NTQLQNEKLY LYYLQNGRDM YVDQELDINR
LSDYDVDHIV PQSFLKDDSI DNKVLTRSDK NRGKSDNVPS EEVVKKMKNY WRQLLNAKLI
TQRKFDNLTK AERGGLSELD KAGFIKRQLV ETRQITKHVA QILDSRMNTK YDENDKLIRE
VKVITLKSKL VSDFRKDFQF YKVREINNYH HAHDAYLNAV VGTALIKKYP KLESEFVYGD
YKVYDVRKMI AKSEQEIGKA TAKYFFYSNI MNFFKTEITL ANGEIRKRPL IETNGETGEI
VWDKGRDFAT VRKVLSMPQV NIVKKTEVQT GGFSKESILP KRNSDKLIAR KKDWDPKKYG
GFDSPTVAYS VLVVAKVEKG KSKKLKSVKE LIGITIMERS SFEKNPIDFL EAKGYKEVKK
DLIIKLPKYS LFELENGRKR MLASAGELAK GNELALPSKY VNFLYLASHY EKLKGSPEDN
EQKALFVEQH KHYLDEIIEQ ISEFSKRVIL ADANLDKVLS AYNKHRDKPI REQAENIIHL
FTLTNLGAPA AFKYFDTTID RKRYTSTKEV LDATLIHQSI TGLYETRIDL SQLGGDSRAD
PKKKRKVHHH HHH
iProt106518 (SEQ ID NO: 112):
MAPKKKRKVD KKYSIGLDIG TNSVGWAVIT DEYKVPSKKF KVLGNTDRHS IKKNLIGALL
FDSGETAEAT RLKRTARRRY TRRKNRILYL QEIFSNEMAK VDDSFFHRLE ESFLVEEDKK
HERHPIFGNI VDEVAYHEKY PTIYHLRKKL VDSTDKADLR LIYLALAHMI KFRGHFLIEG
DLNPDNSDVD KLFIQLVQTY NQLFEENPIN ASGVDAKAIL SARLSKSRRL ENLIAQLPGE
KKNGLFGNLI ALSLGLTPNF KSNFDLAEDA KLQLSKDTYD DDLDNLLAQI GDQYADLFLA
AKNLSDAILL SDILRVNTEI TKAPLSASMI KRYDEHHQDL TLLKALVRQQ LPEKYKEIFF
DQSKNGYAGY IDGGASQEEF YKFIKPILEK MDGTEELLVK LNREDLLRKQ RTFDNGSIPH
QIHLGELHAI LRRQEDFYPF LKDNREKIEK ILTFRIPYYV GPLARGNSRF AWMTRKSEET
ITPWNFEEVV DKGASAQSFI ERMTNFDKNL PNEKVLPKHS LLYEYFTVYN ELTKVKYVTE
GMRKPAFLSG EQKKAIVDLL FKTNRKVTVK QLKEDYFKKI EEFDSVEISG VEDRFNASLG
TYHDLLKIIK DKDFLDNEEN EDILEDIVLT LTLFEDREMI EERLKTYAHL FDDKVMKQLK
RRRYTGWGRL SRKLINGIRD KQSGKTILDF LKSDGFANRN FMQLIHDDSL TFKEDIQKAQ
VSGQGDSLHE HIANLAGSPA IKKGILQTVK VVDELVKVMG RHKPENIVIE MARENQTTQK
GQKNSRERMK RIEEGIKELG SQILKEHPVE NTQLQNEKLY LYYLQNGRDM YVDQELDINR
LSDYDVDHIV PQSFLKDDSI DNKVLTRSDK NRGKSDNVPS EEVVKKMKNY WRQLLNAKLI
TQRKFDNLTK AERGGLSELD KAGFIKRQLV ETRQITKHVA QILDSRMNTK YDENDKLIRE
VKVITLKSKL VSDFRKDFQF YKVREINNYH HAHDAYLNAV VGTALIKKYP KLESEFVYGD
YKVYDVRKMI AKSEQEIGKA TAKYFFYSNI MNFFKTEITL ANGEIRKRPL IETNGETGEI
VWDKGRDFAT VRKVLSMPQV NIVKKTEVQT GGFSKESILP KRNSDKLIAR KKDWDPKKYG
GFDSPTVAYS VLVVAKVEKG KSKKLKSVKE LLGITIMERS SFEKNPIDFL EAKGYKEVKK
DLIIKLPKYS LFELENGRKR MLASAGELQK GNELALPSKY VNFLYLASHY EKLKGSPEDN
EQKQLFVEQH KHYLDEIIEQ ISEFSKRVIL ADANLDKVLS AYNKHRDKPI REQAENIIHL
FTLTNLGAPA AFKYFDTTID RKRYTSTKEV LDATLIHQSI TGLYETRIDL SQLGGDSRAD
PKKKRKVHHH HHH
iProt106519 (SEQ ID NO: 113):
MGSSHHHHHH HHENLYFQGS MDKKYSIGLD IGTNSVGWAV ITDEYKVPSK KFKVLGNTDR
HSIKKNLIGA LLFDSGETAE ATRLKRTARR RYTRRKNRIC YLQEIFSNEM AKVDDSFFHR
LEESELVEED KKHERHPIFG NIVDEVAYHE KYPTIYHLRK KLVDSTDKAD LRLIYLALAH
MIKFRGHFLI EGDLNPDNSD VDKLFIQLVQ TYNQLFEENP INASGVDAKA ILSARLSKSR
RLENLIAQLP GEKKNGLFGN LIALSLGLTP NEKSNFDLAE DAKLQLSKDT YDDDLDNLLA
QIGDQYADLF LAAKNLSDAI LLSDILRVNT EITKAPLSAS MIKRYDEHHQ DLTLLKALVR
QQLPEKYKEI FFDQSKNGYA GYIDGGASQE EFYKFIKPIL EKMDGTEELL VKLNREDLLR
KQRTFDNGSI PHQIHLGELH AILRRQEDFY PFLKDNREKI EKILTFRIPY YVGPLARGNS
RFAWMTRKSE ETITPWNFEE VVDKGASAQS FIERMTNFDK NLPNEKVLPK HSLLYEYFTV
YNELTKVKYV TEGMRKPAFL SGEQKKAIVD LLFKTNRKVT VKQLKEDYFK KIECFDSVEI
SGVEDRFNAS LGTYHDLLKI IKDKDFLDNE ENEDILEDIV LTLTLFEDRE MIEERLKTYA
HLFDDKVMKQ LKRRRYTGWG RLSRKLINGI RDKQSGKTIL DFLKSDGFAN RNFMQLIHDD
SLTFKEDIQK AQVSGQGDSL HEHIANLAGS PAIKKGILQT VKVVDELVKV MGRHKPENIV
IEMARENQTT QKGQKNSRER MKRIEEGIKE LGSQILKEHP VENTQLQNEK LYLYYLQNGR
DMYVDQELDI NRLSDYDVDH IVPQSFLKDD SIDNKVLTRS DKNRGKSDNV PSEEVVKKMK
NYWRQLLNAK LITQRKFDNL TKAERGGLSE LDKAGFIKRQ LVETRQITKH VAQILDSRMN
TKYDENDKLI REVKVITLKS KLVSDFRKDF QFYKVREINN YHHAHDAYLN AVVGTALIKK
YPKLESEFVY GDYKVYDVRK MIAKSEQEIG KATAKYFFYS NIMNFFKTEI TLANGEIRKR
PLIETNGETG EIVWDKGRDF ATVRKVLSMP QVNIVKKTEV QTGGFSKESI LPKRNSDKLI
ARKKDWDPKK YGGFDSPTVA YSVLVVAKVE KGKSKKLKSV KELLGITIME RSSFEKNPID
FLEAKGYKEV KKDLIIKLPK YSLFELENGR KRMLASAGEL QKGNELALPS KYVNFLYLAS
HYEKLKGSPE DNEQKQLFVE QHKHYLDEII EQISEFSKRV ILADANLDKV LSAYNKHRDK
PIREQAENII HLFTLINLGA PAAFKYFDTT IDRKRYTSTK EVLDATLIHQ SITGLYETRI
DLSQLGGDGG GSPKKKRKV
iProt106520 (SEQ ID NO: 114):
MAHHHHHHGG SPKKKRKVDK KYSIGLDIGT NSVGWAVITD EYKVPSKKFK VLGNTDRHSI
KKNLIGALLF DSGETAEATR LKRTARRRYT RRKNRICYLQ EIFSNEMAKV DDSFFHRLEE
SFLVEEDKKH ERHPIFGNIV DEVAYHEKYP TIYHLRKKLV DSTDKADLRL IYLALAHMIK
FRGHFLIEGD LNPDNSDVDK LFIQLVQTYN QLFEENPINA SGVDAKAILS ARLSKSRRLE
NLIAQLPGEK KNGLFGNLIA LSLGLTPNFK SNFDLAEDAK LQLSKDTYDD DLDNLLAQIG
DQYADLFLAA KNLSDAILLS DILRVNTEIT KAPLSASMIK RYDEHHQDLT LLKALVRQQL
PEKYKEIFFD QSKNGYAGYI DGGASQEEFY KFIKPILEKM DGTEELLVKL NREDLLRKQR
TFDNGSIPHQ IHLGELHAIL RRQEDFYPFL KDNREKIEKI LTFRIPYYVG PLARGNSRFA
WMTRKSEETI TPWNFEEVVD KGASAQSFIE RMTNFDKNLP NEKVLPKHSL LYEYFTVYNE
LTKVKYVTEG MRKPAFLSGE QKKAIVDLLF KTNRKVTVKQ LKEDYFKKIE CFDSVEISGV
EDRFNASLGT YHDLLKIIKD KDFLDNEENE DILEDIVLTL TLFEDREMIE ERLKTYAHLF
DDKVMKQLKR RRYTGWGRLS RKLINGIRDK QSGKTILDFL KSDGFANRNF MQLIHDDSLT
FKEDIQKAQV SGQGDSLHEH IANLAGSPAI KKGILQTVKV VDELVKVMGR HKPENIVIEM
ARENQTTQKG QKNSRERMKR IEEGIKELGS QILKEHPVEN TQLQNEKLYL YYLQNGRDMY
VDQELDINRI SDYDVDHIVP QSFLKDDSID NKVLTRSDKN RGKSDNVPSE EVVKKMKNYW
RQLLNAKLIT QRKFDNLTKA ERGGLSELDK AGFIKRQLVE TRQITKHVAQ ILDSRMNTKY
DENDKLIREV KVITLKSKLV SDFRKDFQFY KVREINNYHH AHDAYLNAVV GTALIKKYPK
LESEFVYGDY KVYDVRKMIA KSEQEIGKAT AKYFFYSNIM NFFKTEITLA NGEIRKRPLI
ETNGETGEIV WDKGRDFATV RKVLSMPQVN IVKKTEVQTG GFSKESILPK RNSDKLIARK
KDWDPKKYGG FDSPTVAYSV LVVAKVEKGK SKKLKSVKEL LGITIMERSS FEKNPIDFLE
AKGYKEVKKD LIIKLPKYSL FELENGRKRM LASAGELQKG NELALPSKYV NFLYLASHYE
KLKGSPEDNE QKQLFVEQHK HYLDEIIEQI SEFSKRVILA DANLDKVLSA YNKHRDKPIR
EQAENIIHLF TLTNLGAPAA FKYFDTTIDR KRYTSTKEVL DATLIHQSIT GLYETRIDLS
QLGGDSRADP KKKRKV
iProt106521 (SEQ ID NO: 115):
MAPKKKRKVD KKYSIGLDIG TNSVGWAVIT DEYKVPSKKF KVLGNTDRHS IKKNLIGALL
FDSGETAEAT RLKRTARRRY TRRKNRICYL QEIFSNEMAK VDDSFFHRLE ESFLVEEDKK
HERHPIFGNI VDEVAYHEKY PTIYHLRKKL VDSTDKADLR LIYLALAHMI KFRGHFLIEG
DLNPDNSDVD KLFIQLVQTY NQLFEENPIN ASGVDAKAIL SARLSKSRRL ENLIAQLPGE
KKNGLFGNLI ALSLGLTPNF KSNFDLAEDA KLQLSKDTYD DDLDNLLAQI GDQYADLEFLA
AKNLSDAILL SDILRVNTEI TKAPLSASMI KRYDEHHQDL TLLKALVRQQ LPEKYKEIFF
DQSKNGYAGY IDGGASQEEF YKFIKPILEK MDGTEELLVK LNREDLLRKQ RTFDNGSIPH
QIHLGELHAI LRRQEDFYPF LKDNREKIEK ILTFRIPYYV GPLARGNSRF AWMTRKSEET
ITPWNFEEVV DKGASAQSFI ERMTNFDKNL PNEKVLPKHS LLYEYFTVYN ELTKVKYVTE
GMRKPAFLSG EQKKAIVDLL FKTNRKVTVK QLKEDYFKKI ECFDSVEISG VEDRFNASLG
TYHDLLKIIK DKDFLDNEEN EDILEDIVLT LTLFEDREMI EERLKTYAHL FDDKVMKQLK
RRRYTGWGRL SRKLINGIRD KQSGKTILDF LKSDGFANRN FMQLIHDDSL TFKEDIQKAQ
VSGQGDSLHE HIANLAGSPA IKKGILQTVK VVDELVKVMG RHKPENIVIE MARENQTTQK
GQKNSRERMK RIEEGIKELG SQILKEHPVE NTQLQNEKLY LYYLQNGRDM YVDQELDINR
LSDYDVDHIV PQSFLKDDSI DNKVLTRSDK NRGKSDNVPS EEVVKKMKNY WRQLLNAKLI
TQRKFDNLTK AERGGLSELD KAGFIKRQLV ETRQITKHVA QILDSRMNTK YDENDKLIRE
VKVITLKSKL VSDFRKDFQF YKVREINNYH HAHDAYLNAV VGTALIKKYP KLESEFVYGD
YKVYDVRKMI AKSEQEIGKA TAKYFFYSNI MNFFKTEITL ANGEIRKRPL IETNGETGEI
VWDKGRDFAT VRKVLSMPQV NIVKKTEVQT GGFSKESILP KRNSDKLIAR KKDWDPKKYG
GFDSPTVAYS VLVVAKVEKG KSKKLKSVKE LLGITIMERS SFEKNPIDFL EAKGYKEVKK
DLIIKLPKYS LFELENGRKR MLASAGELQK GNELALPSKY VNFLYLASHY EKLKGSPEDN
EQKQLFVEQH KHYLDEIIEQ ISEFSKRVIL ADANLDKVLS AYNKHRDKPI REQAENIIHL
FTLTNLGAPA AFKYFDTTID RKRYTSTKEV LDATLIHQSI TGLYETRIDL SQLGGDSRAD
HHHHHH
iProt106522 (SEQ ID NO: 116):
MAHHHHHHGG SDKKYSIGLD IGTNSVGWAV ITDEYKVPSK KFKVLGNTDR HSIKKNLIGA
LLFDSGETAE ATRLKRTARR RYTRRKNRIC YLQEIFSNEM AKVDDSFFHR LEESFLVEED
KKHERHPIFG NIVDEVAYHE KYPTIYHLRK KLVDSTDKAD LRLIYLALAH MIKFRGHFLI
EGDLNPDNSD VDKLFIQLVQ TYNQLFEENP INASGVDAKA ILSARLSKSR RLENLIAQLP
GEKKNGLFGN LIALSLGLTP NEKSNFDLAE DAKLQLSKDT YDDDLDNLLA QIGDQYADLF
LAAKNLSDAI LLSDILRVNT EITKAPLSAS MIKRYDEHHQ DLTLLKALVR QQLPEKYKEI
FFDQSKNGYA GYIDGGASQE EFYKFIKPIL EKMDGTEELL VKLNREDLLR KQRTFDNGSI
PHQIHLGELH AILRRQEDFY PFLKDNREKI EKILTFRIPY YVGPLARGNS RFAWMTRKSE
ETITPWNFEE VVDKGASAQS FIERMTNFDK NLPNEKVLPK HSLLYEYFTV YNELTKVKYV
TEGMRKPAFL SGEQKKAIVD LLFKTNRKVT VKQLKEDYFK KIECFDSVEI SGVEDRFNAS
LGTYHDLLKI IKDKDFLDNE ENEDILEDIV LTLTLFEDRE MIEERLKTYA HLFDDKVMKQ
LKRRRYTGWG RLSRKLINGI RDKQSGKTIL DFLKSDGFAN RNFMQLIHDD SLTFKEDIQK
AQVSGQGDSI HEHIANLAGS PAIKKGILQT VKVVDELVKV MGRHKPENIV IEMARENQTT
QKGQKNSRER MKRIEEGIKE LGSQILKEHP VENTQLQNEK LYLYYLQNGR DMYVDQELDI
NRLSDYDVDH IVPQSFLKDD SIDNKVLTRS DKNRGKSDNV PSEEVVKKMK NYWRQLLNAK
LITQRKFDNL TKAERGGLSE LDKAGFIKRQ LVETRQITKH VAQILDSRMN TKYDENDKLI
REVKVITLKS KLVSDFRKDE QFYKVREINN YHHAHDAYLN AVVGTALIKK YPKLESEFVY
GDYKVYDVRK MIAKSEQEIG KATAKYFFYS NIMNFFKTEI TLANGEIRKR PLIETNGETG
EIVWDKGRDF ATVRKVLSMP QVNIVKKTEV QTGGFSKESI LPKRNSDKLI ARKKDWDPKK
YGGFDSPTVA YSVLVVAKVE KGKSKKLKSV KELLGITIME RSSFEKNPID FLEAKGYKEV
KKDLIIKLPK YSLFELENGR KRMLASAGEL QKGNELALPS KYVNFLYLAS HYEKLKGSPE
DNEQKQLEVE QHKHYLDEII EQISEFSKRV ILADANLDKV LSAYNKHRDK PIREQAENII
HLFTLTNLGA PAAFKYFDTT IDRKRYTSTK EVLDATLIHQ SITGLYETRI DLSQLGGDSR
ADPKKKRKV
iProt106658 (SEQ ID NO: 117):
MGSSHHHHHH HHENLYFQGS MDKKYSIGLD IGTNSVGWAV ITDEYKVPSK KFKVLGNTDR
HSIKKNLIGA LLFDSGETAE ATRLKRTARR RYTRRKNRIC YLQEIFSNEM AKVDDSFFHR
LEESFLVEED KKHERHPIFG NIVDEVAYHE KYPTIYHLRK KLVDSTDKAD LRLIYLALAH
MIKFRGHFLI EGDLNPDNSD VDKLFIQLVQ TYNQLFEENP INASGVDAKA ILSARLSKSR
RLENLIAQLP GEKKNGLFGN LIALSLGLTP NFKSNFDLAE DAKLQLSKDT YDDDLDNLLA
QIGDQYADLF LAAKNLSDAI LLSDILRVNT EITKAPLSAS MIKRYDEHHQ DLTLLKALVR
QQLPEKYKEI FFDQSKNGYA GYIDGGASQE EFYKFIKPIL EKMDGTEELL VKLNREDLLR
KQRTFDNGSI PHQIHLGELH AILRRQEDFY PFLKDNREKI EKILTFRIPY YVGPLARGNS
RFAWMTRKSE ETITPWNFEE VVDKGASAQS FIERMTNFDK NLPNEKVLPK HSLLYEYFTV
YNELTKVKYV TEGMRKPAFL SGEQKKAIVD LLFKTNRKVT VKQLKEDYFK KIECFDSVEI
SGVEDRFNAS LGTYHDLLKI IKDKDFLDNE ENEDILEDIV LTLTLFEDRE MIEERLKTYA
HLFDDKVMKQ LKRRRYTGWG RLSRKLINGI RDKQSGKTIL DFLKSDGFAN RNFMQLIHDD
SLTFKEDIQK AQVSGQGDSL HEHIANLAGS PAIKKGILQT VKVVDELVKV MGRHKPENIV
IEMARENQTT QKGQKNSRER MKRIEEGIKE LGSQILKEHP VENTQLQNEK LYLYYLQNGR
DMYVDQELDI NRLSDYDVDH IVPQSFLKDD SIDNKVLTRS DKNRGKSDNV PSEEVVKKMK
NYWRQLLNAK LITQRKFDNL TKAERGGLSE LDKAGFIKRQ LVETRQITKH VAQILDSRMN
TKYDENDKLI REVKVITLKS KLVSDFRKDF QFYKVREINN YHHAHDAYLN AVVGTALIKK
YPKLESEFVY GDYKVYDVRK MIAKSEQEIG KATAKYFFYS NIMNFFKTEI TLANGEIRKR
PLIETNGETG EIVWDKGRDF ATVRKVLSMP QVNIVKKTEV QTGGFSKESI LPKRNSDKLI
ARKKDWDPKK YGGFDSPTVA YSVLVVAKVE KGKSKKLKSV KELLGITIME RSSFEKNPID
FLEAKGYKEV KKDLIIKLPK YSLFELENGR KRMLASAGEL QKGNELALPS KYVNFLYLAS
HYEKLKGSPE DNEQKQLFVE QHKHYLDEII EQISEFSKRV ILADANLDKV LSAYNKHRDK
PIREQAENII HLFTLINLGA PAAFKYEDTT IDRKRYTSTK EVLDATLIHQ SITGLYETRI
DLSQLGGDGG GSPKKKRKV
iProt106745 (SEQ ID NO: 118):
MAPKKKRKVD KKYSIGLDIG TNSVGWAVIT DEYKVPSKKF KVLGNTDRHS IKKNLIGALL
FDSGETAEAT RLKRTARRRY TRRKNRICYL QEIFSNEMAK VDDSFFHRLE ESFLVEEDKK
HERHPIFGNI VDEVAYHEKY PTIYHLRKKL VDSTDKADLR LIYLALAHMI KFRGHFLIEG
DLNPDNSDVD KLFIQLVQTY NQLFEENPIN ASGVDAKAIL SARLSKSRRL ENLIAQLPGE
KKNGLFGNLI ALSLGLTPNF KSNFDLAEDA KLQLSKDTYD DDLDNLLAQI GDQYADLFLA
AKNLSDAILL SDILRVNTEI TKAPLSASMI KRYDEHHQDL TLLKALVRQQ LPEKYKEIFF
DQSKNGYAGY IDGGASQEEF YKFIKPILEK MDGTEELLVK LNREDLLRKQ RTFDNGSIPH
QIHLGELHAI LRRQEDFYPF LKDNREKIEK ILTFRIPYYV GPLARGNSRF AWMTRKSEET
ITPWNFEEVV DKGASAQSFI ERMTNFDKNL PNEKVLPKHS LLYEYFTVYN ELTKVKYVTE
GMRKPAFLSG EQKKAIVDLL FKTNRKVTVK QLKEDYFKKI ECFDSVEISG VEDRFNASLG
TYHDLLKIIK DKDFLDNEEN EDILEDIVLT LTLFEDREMI EERLKTYAHL FDDKVMKQLK
RRRYTGWGRL SRKLINGIRD KQSGKTILDF LKSDGFANRN FMQLIHDDSL TFKEDIQKAQ
VSGQGDSLHE HIANLAGSPA IKKGILQTVK VVDELVKVMG RHKPENIVIE MARENQTTQK
GQKNSRERMK RIEEGIKELG SQILKEHPVE NTQLQNEKLY LYYLQNGRDM YVDQELDINR
LSDYDVDHIV PQSFLKDDSI DNAVLTRSDK NRGKSDNVPS EEVVKKMKNY WRQLLNAKLI
TQRKFDNLTK AERGGLSELD KAGFIKRQLV ETRQITKHVA QILDSRMNTK YDENDKLIRE
VKVITLKSKL VSDFRKDFQF YKVREINNYH HAHDAYLNAV VGTALIKKYP KLESEFVYGD
YKVYDVRKMI AKSEQEIGKA TAKYFFYSNI MNFFKTEITL ANGEIRKRPL IETNGETGEI
VWDKGRDFAT VRKVLSMPQV NIVKKTEVQT GGFSKESILP KRNSDKLIAR KKDWDPKKYG
GFDSPTVAYS VLVVAKVEKG KSKKLKSVKE LLGITIMERS SFEKNPIDEL EAKGYKEVKK
DLIIKLPKYS LFELENGRKR MLASAGELQK GNELALPSKY VNFLYLASHY EKLKGSPEDN
EQKQLFVEQH KHYLDEIIEQ ISEFSKRVIL ADANLDKVLS AYNKHRDKPI REQAENIIHL
FTLTNLGAPA AFKYFDTTID RKRYTSTKEV LDATLIHQSI TGLYETRIDL SQLGGDSRAD
PKKKRKVHHH HHH
iProt106746 (SEQ ID NO: 119):
MAPKKKRKVD KKYSIGLDIG TNSVGWAVIT DEYKVPSKKF KVLGNTDRHS IKKNLIGALL
FDSGETAEAT RLKRTARRRY TRRKNRICYL QEIFSNEMAK VDDSFFHRLE ESFLVEEDKK
HERHPIFGNI VDEVAYHEKY PTIYHLRKKL VDSTDKADLR LIYLALAHMI KFRGHFLIEG
DLNPDNSDVD KLFIQLVQTY NQLFEENPIN ASGVDAKAIL SARLSKSRRL ENLIAQLPGE
KKNGLFGNLI ALSLGLTPNF KSNFDLAEDA KLQLSKDTYD DDLDNLLAQI GDQYADLFLA
AKNLSDAILL SDILRVNTEI TKAPLSASMI KRYDEHHQDL TLLKALVRQQ LPEKYKEIFF
DQSKNGYAGY IDGGASQEEF YKFIKPILEK MDGTEELLVK LNREDLLRKQ RTFDNGSIPH
QIHLGELHAI LRRQEDFYPF LKDNREKIEK ILTFRIPYYV GPLARGNSRF AWMTRKSEET
ITPWNFEEVV DKGASAQSFI ERMTNFDKNL PNEKVLPKHS LLYEYFTVYN ELTKVKYVTE
GMRKPAFLSG EQKKAIVDLL FKTNRKVTVK QLKEDYFKKI ECFDSVEISG VEDRFNASLG
TYHDLLKIIK DKDFLDNEEN EDILEDIVLT LTLFEDREMI EERLKTYAHL FDDKVMKQLK
RRRYTGWGRL SRKLINGIRD KQSGKTILDF LKSDGFANRN FMQLIHDDSL TFKEDIQKAQ
VSGQGDSLHE HIANLAGSPA IKKGILQTVK VVDELVKVMG RHKPENIVIE MARENQTTQK
GQKNSRERMK RIEEGIKELG SQILKEHPVE NTQLQNEALY LYYLQNGRDM YVDQELDINR
LSDYDVDHIV PQSFLKDDSI DNKVLTRSDK NRGKSDNVPS EEVVKKMKNY WRQLLNAKLI
TQRKFDNLTK AERGGLSELD KAGFIKRQLV ETRQITKHVA QILDSRMNTK YDENDKLIRE
VKVITLKSKL VSDFRKDFQF YKVREINNYH HAHDAYLNAV VGTALIKKYP ALESEFVYGD
YKVYDVRKMI AKSEQEIGKA TAKYFFYSNI MNFEKTEITL ANGEIRKAPL IETNGETGEI
VWDKGRDFAT VRKVLSMPQV NIVKKTEVQT GGFSKESILP KRNSDKLIAR KKDWDPKKYG
GFDSPTVAYS VLVVAKVEKG KSKKLKSVKE LLGITIMERS SFEKNPIDFL EAKGYKEVKK
DLIIKLPKYS LFELENGRKR MLASAGELQK GNELALPSKY VNFLYLASHY EKLKGSPEDN
EQKQLFVEQH KHYLDEIIEQ ISEFSKRVIL ADANLDKVLS AYNKHRDKPI REQAENIIHL
FTLTNLGAPA AFKYFDTTID RKRYTSTKEV LDATLIHQSI TGLYETRIDL SQLGGDSRAD
PKKKRKVHHH HHH
iProt106747 (SEQ ID NO: 120):
MAPKKKRKVD KKYSIGLDIG TNSVGWAVIT DEYKVPSKKF KVLGNTDRHS IKKNLIGALL
FDSGETAEAT RLKRTARRRY TRRKNRICYL QEIFSNEMAK VDDSFFHRLE ESFLVEEDKK
HERHPIFGNI VDEVAYHEKY PTIYHLRKKL VDSTDKADLR LIYLALAHMI KFRGHFLIEG
DLNPDNSDVD KLFIQLVQTY NQLFEENPIN ASGVDAKAIL SARLSKSRRL ENLIAQLPGE
KKNGLFGNLI ALSLGLTPNF KSNFDLAEDA KLQLSKDTYD DDLDNLLAQI GDQYADLFLA
AKNLSDAILL SDILRVNTEI TKAPLSASMI KRYDEHHQDL TLLKALVRQQ LPEKYKEIFF
DQSKNGYAGY IDGGASQEEF YKFIKPILEK MDGTEELLVK LNREDLLRKQ RTFDNGSIPH
QIHLGELHAI LRRQEDFYPF LKDNREKIEK ILTFRIPYYV GPLARGNSRF AWMTRKSEET
ITPWNFEEVV DKGASAQSFI ERMTNFDKNL PNEKVLPKHS LLYEYFTVYN ELTKVKYVTE
GMRKPAFLSG EQKKAIVDLL FKTNRKVTVK QLKEDYFKKI ECFDSVEISG VEDRFNASLG
TYHDLLKIIK DKDFLDNEEN EDILEDIVLT LTLFEDREMI EERLKTYAHL FDDKVMKQLK
RRRYTGWGRL SRKLINGIRD KQSGKTILDF LKSDGFANRN FMQLIHDDSL TFKEDIQKAQ
VSGQGDSLHE HIANLAGSPA IKKGILQTVK VVDELVKVMG RHKPENIVIE MARENQTTQK
GQKNSRERMK RIEEGIKELG SQILKEHPVE NTQLQNEKLY LYYLQNGRDM YVDQELDINR
LSDYDVDHIV PQSFLADDSI DNKVLTRSDK NRGKSDNVPS EEVVKKMKNY WRQLLNAKLI
TQRKFDNLTK AERGGLSELD KAGFIKRQLV ETRQITKHVA QILDSRMNTK YDENDKLIRE
VKVITLKSKL VSDFRKDEQF YKVREINNYH HAHDAYLNAV VGTALIKKYP ALESEFVYGD
YKVYDVRKMI AKSEQEIGKA TAKYFFYSNI MNFFKTEITL ANGEIRKAPL IETNGETGEI
VWDKGRDFAT VRKVLSMPQV NIVKKTEVQT GGFSKESILP KRNSDKLIAR KKDWDPKKYG
GFDSPTVAYS VLVVAKVEKG KSKKLKSVKE LLGITIMERS SFEKNPIDFL EAKGYKEVKK
DLIIKLPKYS LFELENGRKR MLASAGELQK GNELALPSKY VNFLYLASHY EKLKGSPEDN
EQKQLFVEQH KHYLDEIIEQ ISEFSKRVIL ADANLDKVLS AYNKHRDKPI REQAENIIHL
FTLTNLGAPA AFKYFDTTID RKRYTSTKEV LDATLIHQSI TGLYETRIDL SQLGGDSRAD
PKKKRKVHHH HHH
iProt106884 (SEQ ID NO: 121):
MAPKKKRKVD KKYSIGLDIG TNSVGWAVIT DEYKVPSKKF KVLGNTDRHS IKKNLIGALL
FDSGETAEAT RLKRTARRRY TRRKNRICYL QEIFSNEMAK VDDSFFHRLE ESFLVEEDKK
HERHPIFGNI VDEVAYHEKY PTIYHLRKKL VDSTDKADLR LIYLALAHMI KFRGHFLIEG
DLNPDNSDVD KLFIQLVQTY NQLFEENPIN ASGVDAKAIL SARLSKSRRL ENLIAQLPGE
KKNGLFGNLI ALSLGLTPNF KSNFDLAEDA KLQLSKDTYD DDLDNLLAQI GDQYADLFLA
AKNLSDAILL SDILRVNTEI TKAPLSASMI KRYDEHHQDL TLLKALVRQQ LPEKYKEIFF
DQSKNGYAGY IDGGASQEEF YKFIKPILEK MDGTEELLVK LNREDLLRKQ RTFDNGSIPH
QIHLGELHAI LRRQEDFYPF LKDNREKIEK ILTFRIPYYV GPLARGNSRF AWMTRKSEET
ITPWNFEEVV DKGASAQSFI ERMTAFDKNL PNEKVLPKHS LLYEYETVYN ELTKVKYVTE
GMRKPAFLSG EQKKAIVDLL FKTNRKVTVK QLKEDYFKKI ECFDSVEISG VEDRFNASLG
TYHDLLKIIK DKDFLDNEEN EDILEDIVLT LTLFEDREMI EERLKTYAHL FDDKVMKQLK
RRRYTGWGAL SRKLINGIRD KQSGKTILDF LKSDGFANRN FMALIHDDSL TFKEDIQKAQ
VSGQGDSLHE HIANLAGSPA IKKGILQTVK VVDELVKVMG RHKPENIVIE MARENQTTQK
GQKNSRERMK RIEEGIKELG SQILKEHPVE NTQLQNEKLY LYYLQNGRDM YVDQELDINR
LSDYDVDHIV PQSFLKDDSI DNKVLTRSDK NRGKSDNVPS EEVVKKMKNY WRQLLNAKLI
TQRKFDNLTK AERGGLSELD KAGFIKRQLV ETRAITKHVA QILDSRMNTK YDENDKLIRE
VKVITLKSKL VSDFRKDFQF YKVREINNYH HAHDAYLNAV VGTALIKKYP KLESEFVYGD
YKVYDVRKMI AKSEQEIGKA TAKYFFYSNI MNFFKTEITL ANGEIRKRPL IETNGETGEI
VWDKGRDFAT VRKVLSMPQV NIVKKTEVQT GGFSKESILP KRNSDKLIAR KKDWDPKKYG
GFDSPTVAYS VLVVAKVEKG KSKKLKSVKE LLGITIMERS SFEKNPIDFL EAKGYKEVKK
DLIIKLPKYS LFELENGRKR MLASAGELQK GNELALPSKY VNFLYLASHY EKLKGSPEDN
EQKQLFVEQH KHYLDEIIEQ ISEFSKRVIL ADANLDKVLS AYNKHRDKPI REQAENIIHL
FTLTNLGAPA AFKYFDTTID RKRYTSTKEV LDATLIHQSI TGLYETRIDL SQLGGDSRAD
PKKKRKVHHH HHH
iPROT 109496 (SEQ ID NO: 123):
MAPKKKRKVDKKYSIGLDIGTNSVGWAVITDEYKVPSKKFKVLGNTDRHSIKKNLIGALLFDS
GETAEATRLKRTARRRYTRRKNRILYLQEIFSNEMAKVDDSFFHRLEESFLVEEDKKHERHPI
FGNIVDEVAYHEKYPTIYHLRKKLVDSTDKADLRLIYLALAHMIKFRGHFLIEGDLNPDNSDV
DKLFIQLVQTYNQLFEENPINASGVDAKAILSARLSKSRRLENLIAQLPGEKKNGLFGNLIAL
SLGLTPNFKSNFDLAEDAKLQLSKDTYDDDLDNLLAQIGDQYADLFLAAKNLSDAILLSDILR
VNTEITKAPLSASMIKRYDEHHQDLTLLKALVRQQLPEKYKEIFFDQSKNGYAGYIDGGASQE
EFYKFIKPILEKMDGTEELLVKLNREDLLRKQRTFDNGSIPHQIHLGELHAILRRQEDFYPFL
KDNREKIEKILTFRIPYYVGPLARGNSRFAWMTRKSEETITPWNFEEVVDKGASAQSFIERMT
NFDKNLPNEKVLPKHSLLYEYFTVYNELTKVKYVTEGMRKPAFLSGEQKKAIVDLLFKTNRKV
TVKQLKEDYFKKIEEFDSVEISGVEDRFNASLGTYHDLLKIIKDKDFLDNEENEDILEDIVLT
LTLFEDREMIEERLKTYAHLFDDKVMKQLKRRRYTGWGRLSRKLINGIRDKQSGKTILDFLKS
DGFANRNFMQLIHDDSLTFKEDIQKAQVSGQGDSLHEHIANLAGSPAIKKGILQTVKVVDELV
KVMGRHKPENIVIEMARENQTTQKGQKNSRERMKRIEEGIKELGSQILKEHPVENTQLQNEKL
YLYYLQNGRDMYVDQELDINRLSDYDVDHIVPQSFLKDDSIDNKVLTRSDKNRGKSDNVPSEE
VVKKMKNYWRQLLNAKLITQRKFDNLTKAERGGLSELDKAGFIKRQLVETRQITKHVAQILDS
RMNTKYDENDKLIREVKVITLKSKLVSDFRKDFQFYKVREINNYHHAHDAYLNAVVGTALIKK
YPKLESEFVYGDYKVYDVRKMIAKSEQEIGKATAKYFFYSNIMNFFKTEITLANGEIRKRPLI
ETNGETGEIVWDKGRDFATVRKVLSMPQVNIVKKTEVQTGGFSKESILPKRNSDKLIARKKDW
DPKKYGGFDSPTVAYSVLVVAKVEKGKSKKLKSVKELLGITIMERSSFEKNPIDFLEAKGYKE
VKKDLIIKLPKYSLFELENGRKRMLASAGELQKGNELALPSKYVNFLYLASHYEKLKGSPEDN
EQKQLFVEQHKHYLDEIIEQISEFSKRVILADANLDKVLSAYNKHRDKPIREQAENIIHLFTL
TNLGAPAAFKYFDTTIDRKRYTSTKEVLDATLIHQSITGLYETRIDLSQLGGDSRADHHHHHH

### Nucleic Acids Encoding Cas9 Molecules

[0380] Nucleic acids encoding the Cas9 molecules discussed above, e.g., an active Cas9 molecule or an inactive Cas9 molecule are provided herein.

[0381] Exemplary nucleic acids encoding Cas9 molecules are described in Cong et al, SCIENCE 2013, 399 (6121): 819-823; Wang et al, CELL 2013, 153 (4): 910-918; Mali et al., SCIENCE 2013, 399 (6121): 823-826; Jinek et al, SCIENCE 2012, 337 (6096): 816-821.

[0382] In an embodiment, a nucleic acid encoding a Cas9 molecule can be a synthetic nucleic acid sequence. For example, the synthetic nucleic acid molecule can be chemically modified, e.g., as described in Section XIII. In an embodiment, the Cas9 mRNA has one or more of, e.g., all of the following properties: it is capped, polyadenylated, substituted with 5-methylcytidine and/or pseudouridine.

[0383] In addition or alternatively, the synthetic nucleic acid sequence can be codon optimized, e.g., at least one non-common codon or less-common codon has been replaced by a common codon. For example, the synthetic nucleic acid can direct the synthesis of an optimized messenger mRNA, e.g., optimized for expression in a mammalian expression system, e.g., described herein.

[0384] Provided below is an exemplary codon optimized nucleic acid sequence encoding a Cas9 molecule of S. pyogenes.

| (SEQ ID NO: 122) | |
|---|---|
| atggataaaa agtacagcat cgggctggac atcggtacaa actcagtggg gtgggccgtg | 60 |
| attacggacg agtacaaggt accctccaaa aaatttaaag tgctgggtaa cacggacaga | 120 |
| cactctataa agaaaaatct tattggagcc ttgctgttcg actcaggcga gacagccgaa | 180 |
| gccacaaggt tgaagcggac cgccaggagg cggtatacca ggagaaagaa ccgcatatgc | 240 |
| tacctgcaag aaatcttcag taacgagatg gcaaaggttg acgatagctt tttccatcgc | 300 |
| ctggaagaat cctttcttgt tgaggaagac aagaagcacg aacggcaccc catctttggc | 360 |
| aatattgtcg acgaagtggc atatcacgaa aagtacccga ctatctacca cctcaggaag | 420 |
| aagctggtgg actctaccga taaggcggac ctcagactta tttatttggc actcgcccac | 480 |
| atgattaaat ttagaggaca tttcttgatc gagggcgacc tgaacccgga caacagtgac | 540 |
| gtcgataagc tgttcatcca acttgtgcag acctacaatc aactgttcga agaaaaccct | 600 |
| ataaatgctt caggagtcga cgctaaagca atcctgtccg cgcgcctctc aaaatctaga | 660 |
| agacttgaga atctgattgc tcagttgccc ggggaaaaga aaaatggatt gtttggcaac | 720 |
| ctgatcgccc tcagtctcgg actgacccca aatttcaaaa gtaacttcga cctggccgaa | 780 |
| gacgctaagc tccagctgtc caaggacaca tacgatgacg acctcgacaa tctgctggcc | 840 |
| cagattgggg atcagtacgc cgatctcttt ttggcagcaa agaacctgtc cgacgccatc | 900 |
| ctgttgagcg atatcttgag agtgaacacc gaaattacta aagcacccct tagcgcatct | 960 |
| atgatcaagc ggtacgacga gcatcatcag gatctgaccc tgctgaaggc tcttgtgagg | 1020 |
| caacagctcc ccgaaaaata caaggaaatc ttctttgacc agagcaaaaa cggctacgct | 1080 |
| ggctatatag atggtggggc cagtcaggag gaattctata aattcatcaa gcccattctc | 1140 |
| gagaaaatgg acggcacaga ggagttgctg gtcaaactta acagggagga cctgctgcgg | 1200 |
| aagcagcgga cctttgacaa cgggtctatc ccccaccaga ttcatctggg cgaactgcac | 1260 |
| gcaatcctga ggaggcagga ggatttttat ccttttctta aagataaccg cgagaaaata | 1320 |
| gaaaagattc ttacattcag gatcccgtac tacgtgggac ctctcgcccg gggcaattca | 1380 |
| cggtttgcct ggatgacaag gaagtcagag gagactatta caccttggaa cttcgaagaa | 1440 |
| gtggtggaca agggtgcatc tgcccagtct ttcatcgagc ggatgacaaa ttttgacaag | 1500 |
| aacctcccta atgagaaggt gctgcccaaa cattctctgc tctacgagta ctttaccgtc | 1560 |
| tacaatgaac tgactaaagt caagtacgtc accgagggaa tgaggaagcc ggcattcctt | 1620 |
| agtggagaac agaagaaggc gattgtagac ctgttgttca agaccaacag gaaggtgact | 1680 |
| gtgaagcaac ttaaagaaga ctactttaag aagatcgaat gttttgacag tgtggaaatt | 1740 |
| tcaggggttg aagaccgctt caatgcgtca ttggggactt accatgatct tctcaagatc | 1800 |
| ataaaggaca aagacttcct ggacaacgaa gaaaatgagg atattctcga agacatcgtc | 1860 |
| ctcaccctga ccctgttcga agacagggaa atgatagaag agcgcttgaa aacctatgcc | 1920 |
| cacctcttcg acgataaagt tatgaagcag ctgaagcgca ggagatacac aggatgggga | 1980 |
| agattgtcaa ggaagctgat caatggaatt agggataaac agagtggcaa gaccatactg | 2040 |
| gatttcctca aatctgatgg cttcgccaat aggaacttca tgcaactgat tcacgatgac | 2100 |
| tctcttacct tcaaggagga cattcaaaag gctcaggtga gcgggcaggg agactccctt | 2160 |
| catgaacaca tcgcgaattt ggcaggttcc cccgctatta aaaagggcat ccttcaaact | 2220 |
| gtcaaggtgg tggatgaatt ggtcaaggta atgggcagac ataagccaga aaatattgtg | 2280 |
| atcgagatgg cccgcgaaaa ccagaccaca cagaagggcc agaaaaatag tagagagcgg | 2340 |
| atgaagagga tcgaggaggg catcaaagag ctgggatctc agattctcaa agaacacccc | 2400 |
| gtagaaaaca cacagctgca gaacgaaaaa ttgtacttgt actatctgca gaacggcaga | 2460 |
| gacatgtacg tcgaccaaga acttgatatt aatagactgt ccgactatga cgtagaccat | 2520 |
| atcgtgcccc agtccttcct gaaggacgac tccattgata acaaagtctt gacaagaagc | 2580 |
| gacaagaaca ggggtaaaag tgataatgtg cctagcgagg aggtggtgaa aaaaatgaag | 2640 |
| aactactggc gacagctgct taatgcaaag ctcattacac aacggaagtt cgataatctg | 2700 |
| acgaaagcag agagaggtgg cttgtctgag ttggacaagg cagggtttat taagcggcag | 2760 |
| ctggtggaaa ctaggcagat cacaaagcac gtggcgcaga ttttggacag ccggatgaac | 2820 |
| acaaaatacg acgaaaatga taaactgata cgagaggtca aagttatcac gctgaaaagc | 2880 |
| aagctggtgt ccgattttcg gaaagacttc cagttctaca aagttcgcga gattaataac | 2940 |
| taccatcatg ctcacgatgc gtacctgaac gctgttgtcg ggaccgcctt gataaagaag | 3000 |
| tacccaaagc tggaatccga gttcgtatac ggggattaca aagtgtacga tgtgaggaaa | 3060 |
| atgatagcca agtccgagca ggagattgga aaggccacag ctaagtactt cttttattct | 3120 |
| aacatcatga atttttttaa gacggaaatt accctggcca acggagagat cagaaagcgg | 3180 |
| ccccttatag agacaaatgg tgaaacaggt gaaatcgtct gggataaggg cagggatttc | 3240 |
| gctactgtga ggaaggtgct gagtatgcca caggtaaata tcgtgaaaaa aaccgaagta | 3300 |
| cagaccggag gattttccaa ggaaagcatt ttgcctaaaa gaaactcaga caagctcatc | 3360 |
| gcccgcaaga aagattggga ccctaagaaa tacgggggat ttgactcacc caccgtagcc | 3420 |
| tattctgtgc tggtggtagc taaggtggaa aaaggaaagt ctaagaagct gaagtccgtg | 3480 |
| aaggaactct tgggaatcac tatcatggaa agatcatcct ttgaaaagaa ccctatcgat | 3540 |
| ttcctggagg ctaagggtta caaggaggtc aagaaagacc tcatcattaa actgccaaaa | 3600 |
| tactctctct tcgagctgga aaatggcagg aagagaatgt tggccagcgc cggagagctg | 3660 |
| caaaagggaa acgagcttgc tctgccctcc aaatatgtta attttctcta tctcgcttcc | 3720 |
| cactatgaaa agctgaaagg gtctcccgaa gataacgagc agaagcagct gttcgtcgaa | 3780 |
| cagcacaagc actatctgga tgaaataatc gaacaaataa gcgagttcag caaaagggtt | 3840 |
| atcctggcgg atgctaattt ggacaaagta ctgtctgctt ataacaagca ccgggataag | 3900 |
| cctattaggg aacaagccga gaatataatt cacctcttta cactcacgaa tctcggagcc | 3960 |
| cccgccgcct tcaaatactt tgatacgact atcgaccgga aacggtatac cagtaccaaa | 4020 |
| gaggtcctcg atgccaccct catccaccag tcaattactg gcctgtacga aacacggatc | 4080 |
| gacctctctc aactgggcgg cgactag | 4107 |

[0385] If a Cas9 sequence, e.g., the sequence listed above, is fused with a peptide or polypeptide at the C-terminus (e.g., an inactive Cas9 fused with a transcription repressor at the C-terminus), it is understood that the stop codon will be removed.

### V. Chimeric Antigen Receptors

[0386] Disclosed herein are chimeric antigen receptor (CAR) immune effector cells, e.g., T cells, or chimeric TCR-transduced immune effector cells, e.g., T cells. In particular, disclosed herein are improved CAR immune effector cells modified in a tet gene intron or intron-exon junction, for example at a TET2 intron or intron-exon junction, for example, at the intron between exons 9 and 10 of TET2. In some embodiments, disclosed herein are CAR immune effector cells that have been modified to exhibit partial (but not full) inhibition of the function and/or expression of TET2 to enhance immune effector cell function. In some embodiments, disclosed herein are CAR immune effector cells that have been modified to exhibit full inhibition of the function and/or expression of TET2 to enhance immune effector cell function. In some embodiments, the CAR immune effector cells are modified in a tet gene intron or intron-exon junction, for example at a TET2 intron or intron-exon junction, to specifically disrupt TET2 function and/or insert a heterologous protein specifically at that position. In some embodiments, the disclosure provides for gRNA molecules and CRISPR systems for use in connection with these adoptive immunotherapy methods and reagents to produce CAR immune effector cells, e.g., T cells, or chimeric TCR-transduced immune effector cells, e.g., T cells. The gRNA molecules and CRISPR systems of the disclosure can be used to create adoptive immunotherapy cells and compositions with improved properties, such as efficacy and safety. This section describes, in some embodiments, CAR technology in conjunction with the gRNA molecules and CRISPR systems of the disclosure, and describes improved CAR reagents, e.g., cells and compositions, and methods. Other methods for inserting chimeric antigen receptors into immune effector cells can also be employed, including those described herein or otherwise known to the skilled artisan.

[0387] In general, aspects of the disclosure pertain to or include an isolated nucleic acid molecule encoding a chimeric antigen receptor (CAR), wherein the CAR comprises an antigen binding domain (e.g., antibody or antibody fragment, TCR or TCR fragment) that binds to a tumor antigen as described herein, a transmembrane domain (e.g., a transmembrane domain described herein), and an intracellular signaling domain (e.g., an intracellular signaling domain described herein). In various embodiments, the intracellular signaling domain comprises a costimulatory domain (e.g., a costimulatory domain described herein) and/or a primary signaling domain (e.g., a primary signaling domain described herein).

[0388] In other aspects, the disclosure includes: host cells containing the above nucleic acids and isolated proteins encoded by such nucleic acid molecules. CAR nucleic acid constructs, encoded proteins, vectors containing the CAR nucleic acid constructs, host cells, pharmaceutical compositions, and methods of administration and treatment are also disclosed herein. Further details on their preparation and use are provided in International Patent Application Publication No. WO2015142675, which is incorporated by reference in its entirety.

[0389] In one aspect, the disclosure pertains to a chimeric antigen receptor (CAR) and/or an isolated nucleic acid molecule encoding the CAR, wherein the CAR comprises an antigen binding domain (e.g., antibody or antibody fragment, TCR or TCR fragment) that binds to a tumor-supporting antigen (e.g., a tumor-supporting antigen as described herein), a transmembrane domain (e.g., a transmembrane domain described herein), and an intracellular signaling domain (e.g., an intracellular signaling domain described herein. In some embodiments, the intracellular signaling domain comprises a costimulatory domain (e.g., an intracellular signaling domain comprising a costimulatory domain (e.g., a costimulatory domain described herein) and/or a primary signaling domain (e.g., a primary signaling domain described herein). In some embodiments, the tumor-supporting antigen is an antigen present on a stromal cell or a myeloid-derived suppressor cell (MDSC). In other aspects, the disclosure features polypeptides encoded by such nucleic acids and host cells containing such nucleic acids and/or polypeptides.

[0390] Alternatively, aspects of the disclosure pertain to isolated nucleic acid encoding a chimeric T cell receptor (TCR) comprising a TCR alpha and/or TCR beta variable domain with specificity for a cancer antigen described herein. See for example, Dembic et al., Nature, 320, 232-238 (1986), Schumacher, Nat. Rev. Immunol., 2, 512-519 (2002), Kershaw et al., Nat. Rev. Immunol., 5, 928-940 (2005), Xue et al., Clin. Exp. Immunol., 139, 167-172 (2005), Rossig et al., Mol. Ther., 10, 5-18 (2004), and Murphy et al., Immunity, 22, 403-414 (2005); (Morgan et al. J. Immunol., 171, 3287-3295 (2003), Hughes et al., Hum. Gene Ther., 16, 1-16 (2005), Zhao et al., J. Immunol., 174, 4415-4423 (2005), Roszkowski et al., Cancer Res., 65, 1570-1576 (2005), and Engels et al., Hum. Gene Ther., 16, 799-810 (2005); US2009/03046557, the contents of which are hereby incorporated by reference in their entirety. Such chimeric TCRs may recognize, for example, cancer antigens such as MART-1, gp-100, p53, and NY-ESO-1, MAGE A3/A6, MAGEA3, SSX2, HPV-16 E6 or HPV-16 E7. In other aspects, the disclosure features polypeptides encoded by such nucleic acids and host cells containing such nucleic acids and/or polypeptides.

### Targets

[0391] The present disclosure provides cells, e.g., immune effector cells (e.g., T cells, NK cells), that comprise or at any time comprised a gRNA molecule or CRISPR system as described herein, that are further engineered to contain one or more CARs that direct the immune effector cells to undesired cells (e.g., cancer cells). This is achieved through an antigen binding domain on the CAR that is specific for a cancer associated antigen. There are two classes of cancer associated antigens (tumor antigens) that can be targeted by the CARs of the instant disclosure: (1) a cancer associated antigens that is expressed on the surface of a cancer cell; and (2) a cancer-associated antigen that itself is intracellular, however, a fragment of such antigen (peptide) is presented on the surface of the cancer cells by MHC (major histocompatibility complex).

[0392] In some embodiments, the tumor antigen is chosen from one or more of: CD19; CD123; CD22; CD30; CD171; CS-1 (also referred to as CD2 subset 1, CRACC, SLAMF7, CD319, and 19A24); C-type lectin-like molecule-1 (CLL-1 or CLECL1); CD33; epidermal growth factor receptor variant III (EGFRvIII); ganglioside G2 (GD2); ganglioside GD3 (aNeu5Ac (2-8) aNeu5Ac (2-3) bDGalp (1-4) bDGlcp (1-1) Cer); TNF receptor family member B cell maturation (BCMA); Tn antigen ((Tn Ag) or (GalNAca-Ser/Thr)); prostate-specific membrane antigen (PSMA); Receptor tyrosine kinase-like orphan receptor 1 (ROR1); Fms-Like Tyrosine Kinase 3 (FLT3); Tumor-associated glycoprotein 72 (TAG72); CD38; CD44v6; Carcinoembryonic antigen (CEA); Epithelial cell adhesion molecule (EPCAM); B7H3 (CD276); KIT (CD117); Interleukin-13 receptor subunit alpha-2 (IL-13Ra2 or CD213A2); Mesothelin; Interleukin 11 receptor alpha (IL-11Ra); prostate stem cell antigen (PSCA); Protease Serine 21 (Testisin or PRSS21); vascular endothelial growth factor receptor 2 (VEGFR2); Lewis (Y) antigen; CD24; Platelet-derived growth factor receptor beta (PDGFR-beta); Stage-specific embryonic antigen-4 (SSEA-4); CD20; Folate receptor alpha; Receptor tyrosine-protein kinase ERBB2 (Her2/neu); Mucin 1, cell surface associated (MUC1); epidermal growth factor receptor (EGFR); neural cell adhesion molecule (NCAM); Prostase; prostatic acid phosphatase (PAP); elongation factor 2 mutated (ELF2M); Ephrin B2; fibroblast activation protein alpha (FAP); insulin-like growth factor 1 receptor (IGF-I receptor), carbonic anhydrase IX (CAIX); Proteasome (Prosome, Macropain) Subunit, Beta Type, 9 (LMP2); glycoprotein 100 (gp100); oncogene fusion protein consisting of breakpoint cluster region (BCR) and Abelson murine leukemia viral oncogene homolog 1 (Abl) (bcr-abl); tyrosinase; ephrin type-A receptor 2 (EphA2); Fucosyl GM1; sialyl Lewis adhesion molecule (sLe); ganglioside GM3 (aNeu5Ac (2-3) bDGalp (1-4) bDGlcp (1-1) Cer); transglutaminase 5 (TGS5); high molecular weight-melanoma-associated antigen (HMWMAA); o-acetyl-GD2 ganglioside (OAcGD2); Folate receptor beta; tumor endothelial marker 1 (TEM1/CD248); tumor endothelial marker 7-related (TEM7R); claudin 6 (CLDN6); thyroid stimulating hormone receptor (TSHR); G protein-coupled receptor class C group 5, member D (GPRC5D); chromosome X open reading frame 61 (CXORF61); CD97; CD179a; anaplastic lymphoma kinase (ALK); Polysialic acid; placenta-specific 1 (PLAC1); hexasaccharide portion of globoH glycoceramide (GloboH); mammary gland differentiation antigen (NY—BR-1); uroplakin 2 (UPK2); Hepatitis A virus cellular receptor 1 (HAVCR1); adrenoceptor beta 3 (ADRB3); pannexin 3 (PANX3); G protein-coupled receptor 20 (GPR20); lymphocyte antigen 6 complex, locus K 9 (LY6K); Olfactory receptor 51E2 (OR51E2); TCR Gamma Alternate Reading Frame Protein (TARP); Wilms tumor protein (WT1); Cancer/testis antigen 1 (NY-ESO-1); Cancer/testis antigen 2 (LAGE-1a); Melanoma-associated antigen 1 (MAGE-A1); ETS translocation-variant gene 6, located on chromosome 12p (ETV6-AML); sperm protein 17 (SPA17); X Antigen Family, Member 1A (XAGE1); angiopoietin-binding cell surface receptor 2 (Tie 2); melanoma cancer testis antigen-1 (MAD-CT-1); melanoma cancer testis antigen-2 (MAD-CT-2); Fos-related antigen 1; tumor protein p53 (p53); p53 mutant; prostein; surviving; telomerase; prostate carcinoma tumor antigen-1 (PCTA-1 or Galectin 8), melanoma antigen recognized by T cells 1 (MelanA or MART1); Rat sarcoma (Ras) mutant; human Telomerase reverse transcriptase (hTERT); sarcoma translocation breakpoints; melanoma inhibitor of apoptosis (ML-IAP); ERG (transmembrane protease, serine 2 (TMPRSS2) ETS fusion gene); N-Acetyl glucosaminyl-transferase V (NA17); paired box protein Pax-3 (PAX3); Androgen receptor; Cyclin B1; v-myc avian myelocytomatosis viral oncogene neuroblastoma derived homolog (MYCN); Ras Homolog Family Member C (RhoC); Tyrosinase-related protein 2 (TRP-2); Cytochrome P450 1B1 (CYP1B1); CCCTC-Binding Factor (Zinc Finger Protein)-Like (BORIS or Brother of the Regulator of Imprinted Sites), Squamous Cell Carcinoma Antigen Recognized By T Cells 3 (SART3); Paired box protein Pax-5 (PAX5); proacrosin binding protein sp32 (OY-TES1); lymphocyte-specific protein tyrosine kinase (LCK); A kinase anchor protein 4 (AKAP-4); synovial sarcoma, X breakpoint 2 (SSX2); Receptor for Advanced Glycation Endproducts (RAGE-1); renal ubiquitous 1 (RU1); renal ubiquitous 2 (RU2); legumain; human papilloma virus E6 (HPV E6); human papilloma virus E7 (HPV E7); intestinal carboxyl esterase; heat shock protein 70-2 mutated (mut hsp70-2); CD79a; CD79b; CD72; Leukocyte-associated immunoglobulin-like receptor 1 (LAIR1); Fc fragment of IgA receptor (FCAR or CD89); Leukocyte immunoglobulin-like receptor subfamily A member 2 (LILRA2); CD300 molecule-like family member f (CD300LF); C-type lectin domain family 12 member A (CLEC12A); bone marrow stromal cell antigen 2 (BST2); EGF-like module-containing mucin-like hormone receptor-like 2 (EMR2); lymphocyte antigen 75 (LY75); Glypican-3 (GPC3); Fc receptor-like 5 (FCRL5); and immunoglobulin lambda-like polypeptide 1 (IGLL1).

[0393] A CAR described herein can comprise an antigen binding domain (e.g., antibody or antibody fragment, TCR or TCR fragment) that binds to a tumor-supporting antigen (e.g., a tumor-supporting antigen as described herein). In some embodiments, the tumor-supporting antigen is an antigen present on a stromal cell or a myeloid-derived suppressor cell (MDSC). Stromal cells can secrete growth factors to promote cell division in the microenvironment. MDSC cells can inhibit T cell proliferation and activation. Without wishing to be bound by theory, in some embodiments, the CAR-expressing cells destroy the tumor-supporting cells, thereby indirectly inhibiting tumor growth or survival.

[0394] In embodiments, the stromal cell antigen is chosen from one or more of: bone marrow stromal cell antigen 2 (BST2), fibroblast activation protein (FAP) and tenascin. In an embodiment, the FAP-specific antibody is, competes for binding with, or has the same CDRs as, sibrotuzumab. In embodiments, the MDSC antigen is chosen from one or more of: CD33, CD11b, C14, CD15, and CD66b. Accordingly, in some embodiments, the tumor-supporting antigen is chosen from one or more of: bone marrow stromal cell antigen 2 (BST2), fibroblast activation protein (FAP) or tenascin, CD33, CD11b, C14, CD15, and CD66b.

[0395] In some embodiments, more than one CAR gene is inserted into an intron (or intron-exon junction) of the TET2 gene, e.g., sequence encoding a first CAR and sequence encoding a second CAR is inserted into an intron (or intron-exon junction) of the TET2 gene. In embodiments, the sequence encoding the first CAR and the sequence encoding the second CAR are separated by sequence of a 2A site, as described herein. In embodiments, the first CAR is a CD19 CAR and the second CAR is a CD20 CAR or CD22 CAR.

[0396] In some embodiments, a CAR gene inserted into an intron of the TET2 gene encodes a CAR comprising two or more antigen binding domains, e.g., two or more antigen binding domains targeting different antigens. Examples of CARs comprising two or more antigen binding domains are described, for example, in WO2016/164731, incorporated herein by reference in its entirety. In embodiments, the first antigen binding domain binds CD19 and the second antigen binding domain binds CD20 or CD22.

[0397] In some embodiments, a CAR gene inserted into an intron of the TET2 gene encodes a regulatable CAR gene system. Exemplary regulatable CAR systems are described in, for example, WO2017/181119, incorporated herein by reference in its entirety.

[0398] In some embodiments, a CAR gene inserted into an intron of the TET2 gene is a CD19 CAR gene. In some embodiments, a CAR gene inserted into an intron of the TET2 gene is a BCMA CAR gene. In some embodiments, a CAR gene inserted into an intron of the TET2 gene is a CD22 CAR gene.

[0399] In some embodiments, a CAR gene inserted into an intron between exons 9 and 10 of the TET2 gene is a CD19 CAR gene. In some embodiments, a CAR gene inserted into an intron between exons 9 and 10 of the TET2 gene is a BCMA CAR gene. In some embodiments, a CAR gene inserted into an intron between exons 9 and 10 of the TET2 gene is a CD22 CAR gene.

### Antigen-Binding Domain Structures

[0400] In some embodiments, the antigen binding domain of the encoded CAR molecule comprises an antibody, an antibody fragment, an scFv, a Fv, a Fab, a (Fab′) 2, a single domain antibody (SDAB), a VH and/or VL domain, a camelid VHH domain, a bi-functional (e.g. bi-specific), or multispecific hybrid antibody (e.g., Lanzavecchia et al., Eur. J. Immunol. 17, 105 (1987)).

[0401] In some instances, scFvs can be prepared according to method known in the art (see, for example, Bird et al., (1988) Science 242:423-426 and Huston et al., (1988) Proc. Natl. Acad. Sci. USA 85:5879-5883). ScFv molecules can be produced by linking VH and VL regions together using flexible polypeptide linkers. The scFv molecules can comprise a linker (e.g., a Ser-Gly linker) with an optimized length and/or amino acid composition. The linker length can greatly affect how the variable regions of a scFv fold and interact. In fact, if a short polypeptide linker is employed (e.g., between 5-10 amino acids) intrachain folding is prevented. Interchain folding is also required to bring the two variable regions together to form a functional epitope binding site. For examples of linker orientation and size see, e.g., Hollinger et al. 1993 Proc Natl Acad. Sci. U.S.A. 90:6444-6448, U.S. Patent Application Publication Nos. 2005/0100543, 2005/0175606, 2007/0014794, and PCT publication Nos. WO2006/020258 and WO2007/024715, is incorporated herein by reference.

[0402] An scFv can comprise a linker of at least 1, 2, 3, 4, 5, 6, 7, 8, 9, 10, 11, 12, 13, 14, 15, 16, 17, 18, 19, 20, 25, 30, 35, 40, 45, 50, or more amino acid residues between its VL and VH regions. The linker sequence may comprise any naturally occurring amino acid. In some embodiments, the linker sequence comprises amino acids glycine and serine. In another embodiment, the linker sequence comprises sets of glycine and serine repeats such as (Gly₄Ser) n, where n is a positive integer equal to or greater than 1 (SEQ ID NO: 26). In one embodiment, the linker can be (Gly₄Ser)₄ (SEQ ID NO:34) or (Gly₄Ser)₃ (SEQ ID NO:35). Variation in the linker length may retain or enhance activity, giving rise to superior efficacy in activity studies.

[0403] In another aspect, the antigen binding domain is a T cell receptor (“TCR”), or a fragment thereof, for example, a single chain TCR (scTCR). Methods to make such TCRs are known in the art. See, e.g., Willemsen R A et al, Gene Therapy 7:1369-1377 (2000); Zhang T et al, Cancer Gene Ther 11:487-496 (2004); Aggen et al, Gene Ther. 19 (4): 365-74 (2012) (references are incorporated herein by its entirety). For example, scTCR can be engineered that contains the Vα and Vβ genes from a T cell clone linked by a linker (e.g., a flexible peptide). This approach is very useful to cancer associated target that itself is intracellular, however, a fragment of such antigen (peptide) is presented on the surface of the cancer cells by MHC.

[0404] In certain embodiments, the encoded antigen binding domain has a binding affinity KD of 10⁻⁴ M to 10⁻⁸ M.

[0405] In one embodiment, the encoded CAR molecule comprises an antigen binding domain that has a binding affinity KD of 10⁻⁴ M to 10⁻⁸ M, e.g., 10⁻⁵ M to 10⁻⁷ M, e.g., 10⁻⁶ M or 10⁻⁷ M, for the target antigen. In one embodiment, the antigen binding domain has a binding affinity that is at least five-fold, 10-fold, 20-fold, 30-fold, 50-fold, 100-fold or 1,000-fold less than a reference antibody, e.g., an antibody described herein. In one embodiment, the encoded antigen binding domain has a binding affinity at least 5-fold less than a reference antibody (e.g., an antibody from which the antigen binding domain is derived). In one aspect such antibody fragments are functional in that they provide a biological response that can include, but is not limited to, activation of an immune response, inhibition of signal-transduction origination from its target antigen, inhibition of kinase activity, and the like, as will be understood by a skilled artisan.

[0406] In one aspect, the antigen binding domain of the CAR is a scFv antibody fragment that is humanized compared to the murine sequence of the scFv from which it is derived.

[0407] In one aspect, the antigen binding domain of a CAR of the disclosure (e.g., a scFv) is encoded by a nucleic acid molecule whose sequence has been codon optimized for expression in a mammalian cell. In one aspect, entire CAR construct of the disclosure is encoded by a nucleic acid molecule whose entire sequence has been codon optimized for expression in a mammalian cell. Codon optimization refers to the discovery that the frequency of occurrence of synonymous codons (i.e., codons that code for the same amino acid) in coding DNA is biased in different species. Such codon degeneracy allows an identical polypeptide to be encoded by a variety of nucleotide sequences. A variety of codon optimization methods is known in the art, and include, e.g., methods disclosed in at least U.S. Pat. Nos. 5,786,464 and 6,114,148.

### Antigen-Binding Domains (and the Targeted Antigens)

[0408] In one embodiment, an antigen binding domain against CD19 is an antigen binding portion, e.g., CDRs, of a CAR, antibody or antigen-binding fragment thereof described in, e.g., PCT publication WO2012/079000; PCT publication WO2014/153270; Kochenderfer, J. N. et al., J. Immunother. 32 (7), 689-702 (2009); Kochenderfer, J. N., et al., Blood, 116 (20), 4099-4102 (2010); PCT publication WO2014/031687; Bejcek, Cancer Research, 55, 2346-2351, 1995; or U.S. Pat. No. 7,446,190.

[0409] In one embodiment, an antigen binding domain against mesothelin is an antigen binding portion, e.g., CDRs, of an antibody, antigen-binding fragment or CAR described in, e.g., PCT publication WO2015/090230. In one embodiment, an antigen binding domain against mesothelin is an antigen binding portion, e.g., CDRs, of an antibody, antigen-binding fragment, or CAR described in, e.g., PCT publication WO1997/025068, WO1999/028471, WO2005/014652, WO2006/099141, WO2009/045957, WO2009/068204, WO2013/142034, WO2013/040557, or WO2013/063419. In one embodiment, an antigen binding domain against mesothelin is an antigen binding portion, e.g., CDRs, of an antibody, antigen-binding fragment, or CAR described in WO/2015/090230.

[0410] In one embodiment, an antigen binding domain against CD123 is an antigen binding portion, e.g., CDRs, of an antibody, antigen-binding fragment or CAR described in, e.g., PCT publication WO2014/130635. In one embodiment, an antigen binding domain against CD123 is an antigen binding portion, e.g., CDRs, of an antibody, antigen-binding fragment, or CAR described in, e.g., PCT publication WO2014/138805, WO2014/138819, WO2013/173820, WO2014/144622, WO2001/66139, WO2010/126066, WO2014/144622, or US2009/0252742. In one embodiment, an antigen binding domain against CD123 is an antigen binding portion, e.g., CDRs, of an antibody, antigen-binding fragment, or CAR described in WO/2016/028896.

[0411] Examples include CAR molecules which include an antigen binding domain, or a VL and VH (in the sequences below, separated by a (G4S) 3 linker (SEQ ID NO: 35)) of:

CD123-1:
(SEQ ID NO: 150)
QVQLVQSGAEVKKPGASVKVSCKASGYTFTGYYMHWVRQAPGQGLEWMG
WINPNSGGTNYAQKFQGRVTMTRDTSISTAYMELSRLRSDDTAVYYCAR
DMNILATVPFDIWGQGTMVTVSSGGGGSGGGGSGGGGSDIQMTQSPSSL
SASVGDRVTITCRASQSISTYLNWYQQKPGKAPNLLIYAAFSLQSGVPS
RFSGSGSGTDFTLTINSLQPEDFATYYCQQGDSVPLTFGGGTKLEIK;
CD123-2:
(SEQ ID NO: 151)
QVQLVQSGAEVKKPGASVKVSCKASGYTFTGYYMHWVRQAPGQGLEWMG
WINPNSGGTNYAQKFQGRVTLTRDTSISTVYMELSRLRSDDTAVYYCAR
DMNILATVPFDIWGQGTMVTVSSGGGGSGGGGSGGGGSDIQMTQSPSSL
SASVGDRVTITCRASQSISSYLNWYQQKPGKAPKLLIYAASSLQSGVPS
RFSGSGSGTDFTLTVNSLQPEDFATYYCQQGDSVPLTFGGGTRLEIK;
CD123-3:
(SEQ ID NO: 153)
QVQLVQSGAEVKKPGASVKVSCKASGYIFTGYYIHWVRQAPGQGLEWMG
WINPNSGGTNYAQKFQGRVTMTRDTSISTAYMELSGLRSDDPAVYYCAR
DMNILATVPFDIWGQGTLVTVSSGGGGSGGGGSGGGGSDIQLTQSPSSL
SASVGDRVTITCRASQSISSYLNWYQQKPGKAPKLLIYAASSLQSGVPS
RFSGSGSGTDFTLTVNSLQPEDFATYYCQQGDSVPLTFGGGTKVEIK;
OR
CD123-4:
(SEQ ID NO: 154)
QVQLQQSGAEVKKSGASVKVSCKASGYTFTDYYMHWLRQAPGQGLEWMG
WINPNSGDTNYAQKFQGRVTLTRDTSISTVYMELSRLRSDDTAVYYCAR
DMNILATVPFDIWGQGTMVTVSSASGGGGSGGRASGGGGSDIQMTQSPS
SLSASVGDRVTITCRASQSISSYLNWYQQKPGKAPKLLIYAASSLQSGV
PSRFSGSGSGTDFTLTISSLQPEDFATYYCQQGDSVPLTFGGGTKVEI
K, from WO2016/0028896.

[0412] The CAR comprising said anti-CD123 binding domain may comprise, for example, the amino acid sequence of:

CAR123-2:
(SEQ ID NO: 155)
MALPVTALLLPLALLLHAARPQVQLVQSGAEVKKPGASVKVSCKASGYT
FTGYYMHWVRQAPGQGLEWMGWINPNSGGTNYAQKFQGRVTLTRDTSIS
TVYMELSRLRSDDTAVYYCARDMNILATVPFDIWGQGTMVTVSSGGGGS
GGGGSGGGGSDIQMTQSPSSLSASVGDRVTITCRASQSISSYLNWYQQK
PGKAPKLLIYAASSLQSGVPSRFSGSGSGTDFTLTVNSLQPEDFATYYC
QQGDSVPLTFGGGTRLEIKTTTPAPRPPTPAPTIASQPLSLRPEACRPA
AGGAVHTRGLDFACDIYIWAPLAGTCGVLLLSLVITLYCKRGRKKLLYI
FKQPFMRPVQTTQEEDGCSCRFPEEEEGGCELRVKFSRSADAPAYKQGQ
NQLYNELNLGRREEYDVLDKRRGRDPEMGGKPRRKNPQEGLYNELQKDK
[sequence omitted];
CAR123-3:
(SEQ ID NO: 156)
MALPVTALLLPLALLLHAARPQVQLVQSGAEVKKPGASVKVSCKASGYI
FTGYYIHWVRQAPGQGLEWMGWINPNSGGTNYAQKFQGRVTMTRDTSIS
TAYMELSGLRSDDPAVYYCARDMNILATVPFDIWGQGTLVTVSSGGGGS
GGGGSGGGGSDIQLTQSPSSLSASVGDRVTITCRASQSISSYLNWYQQK
PGKAPKLLIYAASSLQSGVPSRFSGSGSGTDFTLTVNSLQPEDFATYYC
QQGDSVPLTFGGGTKVEIKTTTPAPRPPTPAPTIASQPLSLRPEACRPA
AGGAVHTRGLDFACDIYIWAPLAGTCGVLLLSLVITLYCKRGRKKLLYI
FKQPFMRPVQTTQEEDGCCRFPEEEEGGCELRVKFSRSADAPAYKQGQN
QLYNELNLGRREEYDVLDKRRGRDPEMGGKPRRKNPQEGLYNELQKDKM
AEAYSEIGMKGERRRGKGHDGLYQGLSTATKDTYDALHMQALPPR;
CAR123-4:
(SEQ ID NO: 157)
MALPVTALLLPLALLLHAARPQVQLQQSGAEVKKSGASVKVSCKASGYT
FTDYYMHWLRQAPGQGLEWMGWINPNSGDTNYAQKFQGRVTLTRDTSIS
TVYMELSRLRSDDTAVYYCARDMNILATVPFDIWGQGTMVTVSSASGGG
GSGGRASGGGGSDIQMTQSPSSLSASVGDRVTITCRASQSISSYLNWYQ
QKPGKAPKLLIYAASSLQSGVPSRFSGSGSGTDFTLTISSLQPEDFATY
YCQQGDSVPLTFGGGTKVEIKTTTPAPRPPTPAPTIASQPLSLRPEACR
PAAGGAVHTRGLDFACDIYIWAPLAGTCGVLLLSLVITLYCK;
OR
CAR123-1:
(SEQ ID NO: 158)
MALPVTALLLPLALLLHAARPQVQLVQSGAEVKKPGASVKVSCKASGYT
FTGYYMHWVRQAPGQGLEWMGWINPNSGGTNYAQKFQGRVTMTRDTSIS
TAYMELSRLRSDDTAVYYCARDMNILATVPFDIWGQGTMVTVSSGGGGS
GGGGSGGGGSDIQMTQSPSSLSASVGDRVTITCRASQSISTYLNWYQQK
PGKAPNLLIYAAFSLQSGVPSRFSGSGSGTDFTLTINSLQPEDFATYYC
QQGDSVPLTFGGGTKLEIKTTTPAPRPPTPAPTIASQPLSLRPEACRPA
AGGAVHTRGLDFACDIYIWAPLAGTCGVLLLSLVITLYCKRGRKKLLYI
FKQPFMRPVQTTQEEDGCSCRFPEEEEGGCELRVKFSRSADAPAYKQGQ
NQLYNELNLGRREEYDVLDKRRGRDPEMGGKPRRKNPQEGLYNELQKDK
[sequence omitted]

[0413] In each case, the CAR may optionally comprise or not comprise the leader sequence included in each of the above sequences (MALPVTALLLPLALLLHAARP; SEQ ID NO: 2).

[0414] In one embodiment, an antigen binding domain against EGFRvIII is an antigen binding portion, e.g., CDRs, of an antibody, antigen-binding fragment or CAR described in, e.g., WO/2014/130657.

[0415] In one embodiment, an antigen binding domain against CD22 is an antigen binding portion, e.g., CDRs, of an antibody described in, e.g., Haso et al., Blood, 121 (7): 1165-1174 (2013); Wayne et al., Clin Cancer Res 16 (6): 1894-1903 (2010); Kato et al., Leuk Res 37 (1): 83-88 (2013); Creative BioMart (creativebiomart.net): MOM-18047-S(P).

[0416] In one embodiment, an antigen binding domain against CS-1 is an antigen binding portion, e.g., CDRs, of Elotuzumab (BMS), see e.g., Tai et al., 2008, Blood 112 (4): 1329-37; Tai et al., 2007, Blood. 110 (5): 1656-63.

[0417] In one embodiment, an antigen binding domain against CLL-1 is an antigen binding portion, e.g., CDRs, of an antibody available from R&D, ebiosciences, Abcam, for example, PE-CLL1-hu Cat #353604 (BioLegend); and PE-CLL1 (CLEC12A) Cat #562566 (BD). In one embodiment, an antigen binding domain against CLL-1 is an antigen binding portion, e.g., CDRs, of an antibody, antigen-binding fragment, or CAR described in WO/2016/014535.

[0418] In one embodiment, an antigen binding domain against CD33 is an antigen binding portion, e.g., CDRs, of an antibody described in, e.g., Bross et al., Clin Cancer Res 7 (6): 1490-1496 (2001) (Gemtuzumab Ozogamicin, hP67.6), Caron et al., Cancer Res 52 (24): 6761-6767 (1992) (Lintuzumab, HuM195), Lapusan et al., Invest New Drugs 30 (3): 1121-1131 (2012) (AVE9633), Aigner et al., Leukemia 27 (5): 1107-1115 (2013) (AMG330, CD33 BiTE), Dutour et al., Adv hematol 2012:683065 (2012), and Pizzitola et al., Leukemia doi: 10.1038/Lue.2014.62 (2014). In one embodiment, an antigen binding domain against CD33 is an antigen binding portion, e.g., CDRs, of an antibody, antigen-binding fragment, or CAR described in WO/2016/014576.

[0419] In one embodiment, an antigen binding domain against GD2 is an antigen binding portion, e.g., CDRs, of an antibody described in, e.g., Mujoo et al., Cancer Res. 47 (4): 1098-1104 (1987); Cheung et al., Cancer Res 45 (6): 2642-2649 (1985), Cheung et al., J Clin Oncol 5 (9): 1430-1440 (1987), Cheung et al., J Clin Oncol 16 (9): 3053-3060 (1998), Handgretinger et al., Cancer Immunol Immunother 35 (3): 199-204 (1992). In some embodiments, an antigen binding domain against GD2 is an antigen binding portion of an antibody selected from mAb 14.18, 14G2a, ch14.18, hu14.18, 3F8, hu3F8, 3G6, 8B6, 60C3, 10B8, ME36.1, and 8H9, see e.g., WO2012033885, WO2013040371, WO2013192294, WO2013061273, WO2013123061, WO2013074916, and WO201385552. In some embodiments, an antigen binding domain against GD2 is an antigen binding portion of an antibody described in US Publication No.: 20100150910 or PCT Publication No.: WO 2011160119.

[0420] In one embodiment, an antigen binding domain against BCMA is an antigen binding portion, e.g., CDRs, of an antibody described in, e.g., WO2012163805, WO200112812, and WO2003062401. In one embodiment, an antigen binding domain against BCMA is an antigen binding portion, e.g., CDRs, of an antibody, antigen-binding fragment, or CAR described in WO/2016/014565.

[0421] In one embodiment, an antigen binding domain against Tn antigen is an antigen binding portion, e.g., CDRs, of an antibody described in, e.g., U.S. Pat. No. 8,440,798, Brooks et al., PNAS 107 (22): 10056-10061 (2010), and Stone et al., OncoImmunology 1 (6): 863-873 (2012).

[0422] In one embodiment, an antigen binding domain against PSMA is an antigen binding portion, e.g., CDRs, of an antibody described in, e.g., Parker et al., Protein Expr Purif 89 (2): 136-145 (2013), US20110268656 (J591 ScFv); Frigerio et al, European J Cancer 49 (9): 2223-2232 (2013) (scFvD2B); WO 2006125481 (mAbs 3/A12, 3/E7 and 3/F11) and single chain antibody fragments (scFv A5 and D7).

[0423] In one embodiment, an antigen binding domain against ROR1 is an antigen binding portion, e.g., CDRs, of an antibody described in, e.g., Hudecek et al., Clin Cancer Res 19 (12): 3153-3164 (2013); WO 2011159847; and US20130101607.

[0424] In one embodiment, an antigen binding domain against FLT3 is an antigen binding portion, e.g., CDRs, of an antibody described in, e.g., WO2011076922, U.S. Pat. No. 5,777,084, EP0754230, US20090297529, and several commercial catalog antibodies (R&D, ebiosciences, Abcam).

[0425] In one embodiment, an antigen binding domain against TAG72 is an antigen binding portion, e.g., CDRs, of an antibody described in, e.g., Hombach et al., Gastroenterology 113 (4): 1163-1170 (1997); and Abcam ab691.

[0426] In one embodiment, an antigen binding domain against FAP is an antigen binding portion, e.g., CDRs, of an antibody described in, e.g., Ostermann et al., Clinical Cancer Research 14:4584-4592 (2008) (FAP5), US Pat. Publication No. 2009/0304718; sibrotuzumab (see e.g., Hofheinz et al., Oncology Research and Treatment 26 (1), 2003); and Tran et al., J Exp Med 210 (6): 1125-1135 (2013).

[0427] In one embodiment, an antigen binding domain against CD38 is an antigen binding portion, e.g., CDRs, of daratumumab (see, e.g., Groen et al., Blood 116 (21): 1261-1262 (2010); MOR202 (see, e.g., U.S. Pat. No. 8,263,746); or antibodies described in U.S. Pat. No. 8,362,211.

[0428] In one embodiment, an antigen binding domain against CD44v6 is an antigen binding portion, e.g., CDRs, of an antibody described in, e.g., Casucci et al., Blood 122 (20): 3461-3472 (2013).

[0429] In one embodiment, an antigen binding domain against CEA is an antigen binding portion, e.g., CDRs, of an antibody described in, e.g., Chmielewski et al., Gastoenterology 143 (4): 1095-1107 (2012).

[0430] In one embodiment, an antigen binding domain against EPCAM is an antigen binding portion, e.g., CDRS, of an antibody selected from MT110, EpCAM-CD3 bispecific Ab (see, e.g., clinicaltrials.gov/ct2/show/NCT00635596); Edrecolomab; 3622W94; ING-1; and adecatumumab (MT201).

[0431] In one embodiment, an antigen binding domain against PRSS21 is an antigen binding portion, e.g., CDRs, of an antibody described in U.S. Pat. No. 8,080,650.

[0432] In one embodiment, an antigen binding domain against B7H3 is an antigen binding portion, e.g., CDRs, of an antibody MGA271 (Macrogenics).

[0433] In one embodiment, an antigen binding domain against KIT is an antigen binding portion, e.g., CDRs, of an antibody described in, e.g., U.S. Pat. No. 7,915,391, US20120288506, and several commercial catalog antibodies.

[0434] In one embodiment, an antigen binding domain against IL-13Ra2 is an antigen binding portion, e.g., CDRs, of an antibody described in, e.g., WO2008/146911, WO2004087758, several commercial catalog antibodies, and WO2004087758.

[0435] In one embodiment, an antigen binding domain against CD30 is an antigen binding portion, e.g., CDRs, of an antibody described in, e.g., U.S. Pat. No. 7,090,843 B1, and EP0805871.

[0436] In one embodiment, an antigen binding domain against GD3 is an antigen binding portion, e.g., CDRs, of an antibody described in, e.g., U.S. Pat. Nos. 7,253,263; 8,207,308; US 20120276046; EP1013761; WO2005035577; and U.S. Pat. No. 6,437,098.

[0437] In one embodiment, an antigen binding domain against CD171 is an antigen binding portion, e.g., CDRs, of an antibody described in, e.g., Hong et al., J Immunother 37 (2): 93-104 (2014).

[0438] In one embodiment, an antigen binding domain against IL-11Ra is an antigen binding portion, e.g., CDRs, of an antibody available from Abcam (cat #ab55262) or Novus Biologicals (cat #EPR5446). In another embodiment, an antigen binding domain again IL-11Ra is a peptide, see, e.g., Huang et al., Cancer Res 72 (1): 271-281 (2012).

[0439] In one embodiment, an antigen binding domain against PSCA is an antigen binding portion, e.g., CDRs, of an antibody described in, e.g., Morgenroth et al., Prostate 67 (10): 1121-1131 (2007) (scFv 7F5); Nejatollahi et al., J of Oncology 2013 (2013), article ID 839831 (scFv C5-II); and US Pat Publication No. 20090311181.

[0440] In one embodiment, an antigen binding domain against VEGFR2 is an antigen binding portion, e.g., CDRs, of an antibody described in, e.g., Chinnasamy et al., J Clin Invest 120 (11): 3953-3968 (2010).

[0441] In one embodiment, an antigen binding domain against LewisY is an antigen binding portion, e.g., CDRs, of an antibody described in, e.g., Kelly et al., Cancer Biother Radiopharm 23 (4): 411-423 (2008) (hu3S193 Ab (scFvs)); Dolezal et al., Protein Engineering 16 (1): 47-56 (2003) (NC10 scFv).

[0442] In one embodiment, an antigen binding domain against CD24 is an antigen binding portion, e.g., CDRs, of an antibody described in, e.g., Maliar et al., Gastroenterology 143 (5): 1375-1384 (2012).

[0443] In one embodiment, an antigen binding domain against PDGFR-beta is an antigen binding portion, e.g., CDRs, of an antibody Abcam ab32570.

[0444] In one embodiment, an antigen binding domain against SSEA-4 is an antigen binding portion, e.g., CDRs, of antibody MC813 (Cell Signaling), or other commercially available antibodies.

[0445] In one embodiment, an antigen binding domain against CD20 is an antigen binding portion, e.g., CDRs, of the antibody Rituximab, Ofatumumab, Ocrelizumab, Veltuzumab, or GA101.

[0446] In one embodiment, an antigen binding domain against Folate receptor alpha is an antigen binding portion, e.g., CDRs, of the antibody IMGN853, or an antibody described in US20120009181; U.S. Pat. No. 4,851,332, LK26: U.S. Pat. No. 5,952,484.

[0447] In one embodiment, an antigen binding domain against ERBB2 (Her2/neu) is an antigen binding portion, e.g., CDRs, of the antibody trastuzumab, or pertuzumab.

[0448] In one embodiment, an antigen binding domain against MUC1 is an antigen binding portion, e.g., CDRs, of the antibody SAR566658.

[0449] In one embodiment, the antigen binding domain against EGFR is antigen binding portion, e.g., CDRs, of the antibody cetuximab, panitumumab, zalutumumab, nimotuzumab, or matuzumab.

[0450] In one embodiment, an antigen binding domain against NCAM is an antigen binding portion, e.g., CDRs, of the antibody clone 2-2B: MAB5324 (EMD Millipore).

[0451] In one embodiment, an antigen binding domain against Ephrin B2 is an antigen binding portion, e.g., CDRs, of an antibody described in, e.g., Abengozar et al., Blood 119 (19): 4565-4576 (2012).

[0452] In one embodiment, an antigen binding domain against IGF-I receptor is an antigen binding portion, e.g., CDRs, of an antibody described in, e.g., U.S. Pat. No. 8,344,112 B2; EP2322550 A1; WO 2006/138315, or PCT/US2006/022995.

[0453] In one embodiment, an antigen binding domain against CAIX is an antigen binding portion, e.g., CDRs, of the antibody clone 303123 (R&D Systems).

[0454] In one embodiment, an antigen binding domain against LMP2 is an antigen binding portion, e.g., CDRs, of an antibody described in, e.g., U.S. Pat. No. 7,410,640, or US20050129701.

[0455] In one embodiment, an antigen binding domain against gp100 is an antigen binding portion, e.g., CDRs, of the antibody HMB45, NKIbetaB, or an antibody described in WO2013165940, or US20130295007

[0456] In one embodiment, an antigen binding domain against tyrosinase is an antigen binding portion, e.g., CDRs, of an antibody described in, e.g., U.S. Pat. No. 5,843,674; or US19950504048.

[0457] In one embodiment, an antigen binding domain against EphA2 is an antigen binding portion, e.g., CDRs, of an antibody described in, e.g., Yu et al., Mol Ther 22 (1): 102-111 (2014).

[0458] In one embodiment, an antigen binding domain against GD3 is an antigen binding portion, e.g., CDRs, of an antibody described in, e.g., U.S. Pat. Nos. 7,253,263; 8,207,308; US 20120276046; EP1013761 A3; 20120276046; WO2005035577; or U.S. Pat. No. 6,437,098.

[0459] In one embodiment, an antigen binding domain against fucosyl GM1 is an antigen binding portion, e.g., CDRs, of an antibody described in, e.g., US20100297138; or WO2007/067992.

[0460] In one embodiment, an antigen binding domain against sLe is an antigen binding portion, e.g., CDRs, of the antibody G193 (for lewis Y), see Scott A M et al, Cancer Res 60:3254-61 (2000), also as described in Neeson et al, J Immunol May 2013 190 (Meeting Abstract Supplement) 177.10.

[0461] In one embodiment, an antigen binding domain against GM3 is an antigen binding portion, e.g., CDRs, of the antibody CA 2523449 (mAb 14F7).

[0462] In one embodiment, an antigen binding domain against HMWMAA is an antigen binding portion, e.g., CDRs, of an antibody described in, e.g., Kmiecik et al., Oncoimmunology 3 (1): e27185 (2014) (PMID: 24575382) (mAb9.2.27); U.S. Pat. No. 6,528,481; WO2010033866; or US20140004124.

[0463] In one embodiment, an antigen binding domain against o-acetyl-GD2 is an antigen binding portion, e.g., CDRs, of the antibody 8B6.

[0464] In one embodiment, an antigen binding domain against TEM1/CD248 is an antigen binding portion, e.g., CDRs, of an antibody described in, e.g., Marty et al., Cancer Lett 235 (2): 298-308 (2006); Zhao et al., J Immunol Methods 363 (2): 221-232 (2011).

[0465] In one embodiment, an antigen binding domain against CLDN6 is an antigen binding portion, e.g., CDRs, of the antibody IMAB027 (Ganymed Pharmaceuticals), see e.g., clinicaltrial.gov/show/NCT02054351.

[0466] In one embodiment, an antigen binding domain against TSHR is an antigen binding portion, e.g., CDRs, of an antibody described in, e.g., U.S. Pat. Nos. 8,603,466; 8,501,415; or U.S. Pat. No. 8,309,693.

[0467] In one embodiment, an antigen binding domain against GPRC5D is an antigen binding portion, e.g., CDRs, of the antibody FAB6300A (R&D Systems); or LS-A4180 (Lifespan Biosciences).

[0468] In one embodiment, an antigen binding domain against CD97 is an antigen binding portion, e.g., CDRs, of an antibody described in, e.g., U.S. Pat. No. 6,846,911; de Groot et al., J Immunol 183 (6): 4127-4134 (2009); or an antibody from R&D: MAB3734.

[0469] In one embodiment, an antigen binding domain against ALK is an antigen binding portion, e.g., CDRs, of an antibody described in, e.g., Mino-Kenudson et al., Clin Cancer Res 16 (5): 1561-1571 (2010).

[0470] In one embodiment, an antigen binding domain against polysialic acid is an antigen binding portion, e.g., CDRs, of an antibody described in, e.g., Nagae et al., J Biol Chem 288 (47): 33784-33796 (2013).

[0471] In one embodiment, an antigen binding domain against PLAC1 is an antigen binding portion, e.g., CDRs, of an antibody described in, e.g., Ghods et al., Biotechnol Appl Biochem 2013 doi: 10.1002/bab.1177.

[0472] In one embodiment, an antigen binding domain against GloboH is an antigen binding portion of the antibody VK9; or an antibody described in, e.g., Kudryashov V et al, Glycoconj J. 15 (3): 243-9 (1998), Lou et al., Proc Natl Acad Sci USA 111 (7): 2482-2487 (2014); MBr1: Bremer E-G et al. J Biol Chem 259:14773-14777 (1984).

[0473] In one embodiment, an antigen binding domain against NY—BR-1 is an antigen binding portion, e.g., CDRs of an antibody described in, e.g., Jager et al., Appl Immunohistochem Mol Morphol 15 (1): 77-83 (2007).

[0474] In one embodiment, an antigen binding domain against WT-1 is an antigen binding portion, e.g., CDRs, of an antibody described in, e.g., Dao et al., Sci Transl Med 5 (176): 176ra33 (2013); or WO2012/135854.

[0475] In one embodiment, an antigen binding domain against MAGE-A1 is an antigen binding portion, e.g., CDRs, of an antibody described in, e.g., Willemsen et al., J Immunol 174 (12): 7853-7858 (2005) (TCR-like scFv).

[0476] In one embodiment, an antigen binding domain against sperm protein 17 is an antigen binding portion, e.g., CDRs, of an antibody described in, e.g., Song et al., Target Oncol 2013 Aug. 14 (PMID: 23943313); Song et al., Med Oncol 29 (4): 2923-2931 (2012).

[0477] In one embodiment, an antigen binding domain against Tie 2 is an antigen binding portion, e.g., CDRs, of the antibody AB33 (Cell Signaling Technology).

[0478] In one embodiment, an antigen binding domain against MAD-CT-2 is an antigen binding portion, e.g., CDRs, of an antibody described in, e.g., PMID: 2450952; U.S. Pat. No. 7,635,753.

[0479] In one embodiment, an antigen binding domain against Fos-related antigen 1 is an antigen binding portion, e.g., CDRs, of the antibody 12F9 (Novus Biologicals).

[0480] In one embodiment, an antigen binding domain against MelanA/MART1 is an antigen binding portion, e.g., CDRs, of an antibody described in, EP2514766 A2; or U.S. Pat. No. 7,749,719.

[0481] In one embodiment, an antigen binding domain against sarcoma translocation breakpoints is an antigen binding portion, e.g., CDRs, of an antibody described in, e.g., Luo et al, EMBO Mol. Med. 4 (6): 453-461 (2012).

[0482] In one embodiment, an antigen binding domain against TRP-2 is an antigen binding portion, e.g., CDRs, of an antibody described in, e.g., Wang et al, J Exp Med. 184 (6): 2207-16 (1996).

[0483] In one embodiment, an antigen binding domain against CYP1B1 is an antigen binding portion, e.g., CDRs, of an antibody described in, e.g., Maecker et al, Blood 102 (9): 3287-3294 (2003).

[0484] In one embodiment, an antigen binding domain against RAGE-1 is an antigen binding portion, e.g., CDRs, of the antibody MAB5328 (EMD Millipore).

[0485] In one embodiment, an antigen binding domain against human telomerase reverse transcriptase is an antigen binding portion, e.g., CDRs, of the antibody cat no: LS-B95-100 (Lifespan Biosciences)

[0486] In one embodiment, an antigen binding domain against intestinal carboxyl esterase is an antigen binding portion, e.g., CDRs, of the antibody 4F12: cat no: LS-B6190-50 (Lifespan Biosciences).

[0487] In one embodiment, an antigen binding domain against mut hsp70-2 is an antigen binding portion, e.g., CDRs, of the antibody Lifespan Biosciences: monoclonal: cat no: LS-C133261-100 (Lifespan Biosciences).

[0488] In one embodiment, an antigen binding domain against CD79a is an antigen binding portion, e.g., CDRs, of the antibody Anti-CD79a antibody [HM47/A9] (ab3121), available from Abcam; antibody CD79A Antibody #3351 available from Cell Signalling Technology; or antibody HPA017748-Anti-CD79A antibody produced in rabbit, available from Sigma Aldrich.

[0489] In one embodiment, an antigen binding domain against CD79b is an antigen binding portion, e.g., CDRs, of the antibody polatuzumab vedotin, anti-CD79b described in Dornan et al., “Therapeutic potential of an anti-CD79b antibody-drug conjugate, anti-CD79b-vc-MMAE, for the treatment of non-Hodgkin lymphoma” Blood. 2009 Sep. 24; 114 (13): 2721-9. doi: 10.1182/blood-2009-02-205500. Epub 2009 Jul. 24, or the bispecific antibody Anti-CD79b/CD3 described in “4507 Pre-Clinical Characterization of T Cell-Dependent Bispecific Antibody Anti-CD79b/CD3 As a Potential Therapy for B Cell Malignancies” Abstracts of 56^{th} ASH Annual Meeting and Exposition, San Francisco, CA Dec. 6-9 2014.

[0490] In one embodiment, an antigen binding domain against CD72 is an antigen binding portion, e.g., CDRs, of the antibody J3-109 described in Myers, and Uckun, “An anti-CD72 immunotoxin against therapy-refractory B-lineage acute lymphoblastic leukemia.” Leuk Lymphoma. 1995 June; 18 (1-2): 119-22, or anti-CD72 (10D6.8.1, mlgG1) described in Polson et al., “Antibody-Drug Conjugates for the Treatment of Non-Hodgkin's Lymphoma: Target and Linker-Drug Selection” Cancer Res Mar. 15, 2009 69; 2358.

[0491] In one embodiment, an antigen binding domain against LAIR1 is an antigen binding portion, e.g., CDRs, of the antibody ANT-301 LAIR1 antibody, available from ProSpec; or anti-human CD305 (LAIR1) Antibody, available from BioLegend.

[0492] In one embodiment, an antigen binding domain against FCAR is an antigen binding portion, e.g., CDRs, of the antibody CD89/FCAR Antibody (Catalog #10414-H08H), available from Sino Biological Inc.

[0493] In one embodiment, an antigen binding domain against LILRA2 is an antigen binding portion, e.g., CDRs, of the antibody LILRA2 monoclonal antibody (M17), clone 3C7, available from Abnova, or Mouse Anti-LILRA2 antibody, Monoclonal (2D7), available from Lifespan Biosciences.

[0494] In one embodiment, an antigen binding domain against CD300LF is an antigen binding portion, e.g., CDRs, of the antibody Mouse Anti-CMRF35-like molecule 1 antibody, Monoclonal [UP-D2, available from BioLegend, or Rat Anti-CMRF35-like molecule 1 antibody, Monoclonal [234903], available from R&D Systems.

[0495] In one embodiment, an antigen binding domain against CLEC12A is an antigen binding portion, e.g., CDRs, of the antibody Bispecific T cell Engager (BiTE) scFv-antibody and ADC described in Noordhuis et al., “Targeting of CLEC12A In Acute Myeloid Leukemia by Antibody-Drug-Conjugates and Bispecific CLL-1×CD3 BiTE Antibody” 53^{rd} ASH Annual Meeting and Exposition, Dec. 10-13, 2011, and MCLA-117 (Merus).

[0496] In one embodiment, an antigen binding domain against BST2 (also called CD317) is an antigen binding portion, e.g., CDRs, of the antibody Mouse Anti-CD317 antibody, Monoclonal [3H4], available from Antibodies-Online or Mouse Anti-CD317 antibody, Monoclonal [696739], available from R&D Systems.

[0497] In one embodiment, an antigen binding domain against EMR2 (also called CD312) is an antigen binding portion, e.g., CDRs, of the antibody Mouse Anti-CD312 antibody, Monoclonal [LS-B8033] available from Lifespan Biosciences, or Mouse Anti-CD312 antibody, Monoclonal available from R&D Systems.

[0498] In one embodiment, an antigen binding domain against LY75 is an antigen binding portion, e.g., CDRs, of the antibody Mouse Anti-Lymphocyte antigen 75 antibody, Monoclonal [HD30] available from EMD Millipore or Mouse Anti-Lymphocyte antigen 75 antibody, Monoclonal [A15797] available from Life Technologies.

[0499] In one embodiment, an antigen binding domain against GPC3 is an antigen binding portion, e.g., CDRs, of the antibody hGC33 described in Nakano K, Ishiguro T, Konishi H, et al. Generation of a humanized anti-glypican 3 antibody by CDR grafting and stability optimization. Anticancer Drugs. 2010 November; 21 (10): 907-916, or MDX-1414, HN3, or YP7, all three of which are described in Feng et al., “Glypican-3 antibodies: a new therapeutic target for liver cancer.” FEBS Lett. 2014 Jan. 21; 588 (2): 377-82.

[0500] In one embodiment, an antigen binding domain against FCRL5 is an antigen binding portion, e.g., CDRs, of the anti-FcRL5 antibody described in Elkins et al., “FcRL5 as a target of antibody-drug conjugates for the treatment of multiple myeloma” Mol Cancer Ther. 2012 October; 11 (10): 2222-32. In one embodiment, an antigen binding domain against FCRL5 is an antigen binding portion, e.g., CDRs, of the anti-FcRL5 antibody described in, for example, WO2001/038490, WO/2005/117986, WO2006/039238, WO2006/076691, WO2010/114940, WO2010/120561, or WO2014/210064.

[0501] In one embodiment, an antigen binding domain against IGLL1 is an antigen binding portion, e.g., CDRs, of the Mouse Anti-Immunoglobulin lambda-like polypeptide 1 antibody, Monoclonal [AT1G4] available from Lifespan Biosciences, Mouse Anti-Immunoglobulin lambda-like polypeptide 1 antibody, Monoclonal [HSL11] available from BioLegend.

[0502] In one embodiment, the antigen binding domain comprises one, two, or three (e.g., all three) heavy chain CDRs, HC CDR1, HC CDR2 and HC CDR3, from an antibody listed above, and/or one, two, or three (e.g., all three) light chain CDRs, LC CDR1, LC CDR2 and LC CDR3, from an antibody listed above. In one embodiment, the antigen binding domain comprises a heavy chain variable region and/or a variable light chain region of an antibody listed above. In some embodiments, the CAR comprises an antigen-binding domain and an Fc region as described herein.

[0503] In another aspect, the antigen binding domain comprises a humanized antibody or an antibody fragment. In some aspects, a non-human antibody is humanized, where specific sequences or regions of the antibody are modified to increase similarity to an antibody naturally produced in a human or fragment thereof. In one aspect, the antigen binding domain is humanized. In some embodiments, a non-human antibody or fragment is humanized and back-mutated to bring the antigen binding affinity of the humanized antibody closer to that of the original non-human antibody or fragment.

[0504] In an embodiment, the antigen-binding domain of a CAR, e.g., a CAR expressed by a cell binds to CD19. CD19 is found on B cells throughout differentiation of the lineage from the pro/pre-B cell stage through the terminally differentiated plasma cell stage. In an embodiment, the antigen binding domain comprises a murine scFv domain that binds to human CD19, e.g., the antigen binding domain of CTL019 (e.g., SEQ ID NO: 160). In an embodiment, the antigen binding domain comprises a humanized antibody or antibody fragment, e.g., a scFv domain, derived from the murine CTL019 scFv. In an embodiment, the antigen binding domain is a human antibody or antibody fragment that binds to human CD19. Exemplary scFv domains (and their sequences, e.g., CDRs, VL and VH sequences) that bind to CD19 are provided in Table 4. The scFv domain sequences provided in Table 4 include a light chain variable region (VL) and a heavy chain variable region (VH). The VL and VH are attached by a linker comprising the sequence GGGGSGGGGSGGGGS (SEQ ID NO: 35), e.g., in the following orientation: VL-linker-VH.

TABLE 4
Antigen Binding domains that bind CD19

| | | | SEQ |
|---|---|---|---|
| | | | ID |
| Antigen | Name | Amino Acid Sequence | NO: |
| CD19 | muCTL019 | DIQMTQTTSSLSASLGDRVTISCRASQDISKYLNWYQQKPDGTVKLLI | 160 |
| | | YHTSRLHSGVPSRFSGSGSGTDYSLTISNLEQEDIATYFCQQGNTLPY | |
| | | TFGGGTKLEITGGGGSGGGGSGGGGSEVKLQESGPGLVAPSQSLSVTC | |
| | | TVSGVSLPDYGVSWIRQPPRKGLEWLGVIWGSETTYYNSALKSRLTII | |
| | | KDNSKSQVFLKMNSLQTDDTAIYYCAKHYYYGGSYAMDYWGQGTSVTV | |
| | | SS | |
| CD19 | huscFv1 | EIVMTQSPATLSLSPGERATLSCRASQDISKYLNWYQQKPGQAPRLLI | 161 |
| | | YHTSRLHSGIPARFSGSGSGTDYTLTISSLQPEDFAVYFCQQGNTLPY | |
| | | TFGQGTKLEIKGGGGSGGGGSGGGGSQVQLQESGPGLVKPSETLSLTC | |
| | | TVSGVSLPDYGVSWIRQPPGKGLEWIGVIWGSETTYYSSSLKSRVTIS | |
| | | KDNSKNQVSLKLSSVTAADTAVYYCAKHYYYGGSYAMDYWGQGTLVTV | |
| | | SS | |
| CD19 | huscFv2 | EIVMTQSPATLSLSPGERATLSCRASQDISKYLNWYQQKPGQAPRLLI | 162 |
| | | YHTSRLHSGIPARFSGSGSGTDYTLTISSLQPEDFAVYFCQQGNTLPY | |
| | | TFGQGTKLEIKGGGGSGGGGSGGGGSQVQLQESGPGLVKPSETLSLTC | |
| | | TVSGVSLPDYGVSWIRQPPGKGLEWIGVIWGSETTYYQSSLKSRVTIS | |
| | | KDNSKNQVSLKLSSVTAADTAVYYCAKHYYYGGSYAMDYWGQGTLVTV | |
| | | SS | |
| CD19 | huscFv3 | QVQLQESGPGLVKPSETLSLTCTVSGVSLPDYGVSWIRQPPGKGLEWI | 163 |
| | | GVIWGSETTYYSSSLKSRVTISKDNSKNQVSLKLSSVTAADTAVYYCA | |
| | | KHYYYGGSYAMDYWGQGTLVTVSSGGGGSGGGGSGGGGSEIVMTQSPA | |
| | | TLSLSPGERATLSCRASQDISKYLNWYQQKPGQAPRLLIYHTSRLHSG | |
| | | IPARFSGSGSGTDYTLTISSLQPEDFAVYFCQQGNTLPYTFGQGTKLE | |
| | | IK | |
| CD19 | huscFv4 | QVQLQESGPGLVKPSETLSLTCTVSGVSLPDYGVSWIRQPPGKGLEWI | 164 |
| | | GVIWGSETTYYQSSLKSRVTISKDNSKNQVSLKLSSVTAADTAVYYCA | |
| | | KHYYYGGSYAMDYWGQGTLVTVSSGGGGGGGGSGGGGSEIVMTQSPA | |
| | | TLSLSPGERATLSCRASQDISKYLNWYQQKPGQAPRLLIYHTSRLHSG | |
| | | IPARFSGSGSGTDYTLTISSLQPEDFAVYFCQQGNTLPYTFGQGTKLE | |
| | | IK | |
| CD19 | huscFv5 | EIVMTQSPATLSLSPGERATLSCRASQDISKYLNWYQQKPGQAPRLLI | 165 |
| | | YHTSRLHSGIPARFSGSGSGTDYTLTISSLQPEDFAVYFCQQGNTLPY | |
| | | TFGQGTKLEIKGGGGSGGGGSGGGGSGGGGSQVQLQESGPGLVKPSET | |
| | | LSLTCTVSGVSLPDYGVSWIRQPPGKGLEWIGVIWGSETTYYSSSLKS | |
| | | RVTISKDNSKNQVSLKLSSVTAADTAVYYCAKHYYYGGSYAMDYWGQG | |
| | | TLVTVSS | |
| CD19 | huscFv6 | EIVMTQSPATLSLSPGERATLSCRASQDISKYLNWYQQKPGQAPRLLI | 166 |
| | | YHTSRLHSGIPARFSGSGSGTDYTLTISSLQPEDFAVYFCQQGNTLPY | |
| | | TFGQGTKLEIKGGGGSGGGGSGGGGSGGGGSQVQLQESGPGLVKPSET | |
| | | LSLTCTVSGVSLPDYGVSWIRQPPGKGLEWIGVIWGSETTYYQSSLKS | |
| | | RVTISKDNSKNQVSLKLSSVTAADTAVYYCAKHYYYGGSYAMDYWGQG | |
| | | TLVTVSS | |
| CD19 | huscFv7 | QVQLQESGPGLVKPSETLSLTCTVSGVSLPDYGVSWIRQPPGKGLEWI | 167 |
| | | GVIWGSETTYYSSSLKSRVTISKDNSKNQVSLKLSSVTAADTAVYYCA | |
| | | KHYYYGGSYAMDYWGQGTLVTVSSGGGGSGGGGSGGGGSGGGGSEIVM | |
| | | TQSPATLSLSPGERATLSCRASQDISKYLNWYQQKPGQAPRLLIYHTS | |
| | | RLHSGIPARFSGSGSGTDYTLTISSLQPEDFAVYFCQQGNTLPYTFGQ | |
| | | GTKLEIK | |
| CD19 | huscFv8 | QVQLQESGPGLVKPSETLSLTCTVSGVSLPDYGVSWIRQPPGKGLEWI | 168 |
| | | GVIWGSETTYYQSSLKSRVTISKDNSKNQVSLKLSSVTAADTAVYYCA | |
| | | KHYYYGGSYAMDYWGQGTLVTVSSGGGGSGGGGSGGGGSGGGGSEIVM | |
| | | TQSPATLSLSPGERATLSCRASQDISKYLNWYQQKPGQAPRLLIYHTS | |
| | | RLHSGIPARFSGSGSGTDYTLTISSLQPEDFAVYFCQQGNTLPYTFGQ | |
| | | GTKLEIK | |
| CD19 | huscFv9 | EIVMTQSPATLSLSPGERATLSCRASQDISKYLNWYQQKPGQAPRLLI | 169 |
| | | YHTSRLHSGIPARFSGSGSGTDYTLTISSLQPEDFAVYFCQQGNTLPY | |
| | | TFGQGTKLEIKGGGGSGGGGSGGGGSGGGGSQVQLQESGPGLVKPSET | |
| | | LSLTCTVSGVSLPDYGVSWIRQPPGKGLEWIGVIWGSETTYYNSSLKS | |
| | | RVTISKDNSKNQVSLKLSSVTAADTAVYYCAKHYYYGGSYAMDYWGQG | |
| | | TLVTVSS | |
| CD19 | Hu | QVQLQESGPGLVKPSETLSLTCTVSGVSLPDYGVSWIRQPPGKGLEWI | 170 |
| | scFv10 | GVIWGSETTYYNSSLKSRVTISKDNSKNQVSLKLSSVTAADTAVYYCA | |
| | | KHYYYGGSYAMDYWGQGTLVTVSSGGGGSGGGGSGGGGSGGGGSEIVM | |
| | | TQSPATLSLSPGERATLSCRASQDISKYLNWYQQKPGQAPRLLIYHTS | |
| | | RLHSGIPARFSGSGSGTDYTLTISSLQPEDFAVYFCQQGNTLPYTFGQ | |
| | | GTKLEIK | |
| CD19 | Hu | EIVMTQSPATLSLSPGERATLSCRASQDISKYLNWYQQKPGQAPRLLI | 171 |
| | scFv11 | YHTSRLHSGIPARFSGSGSGTDYTLTISSLQPEDFAVYFCQQGNTLPY | |
| | | TFGQGTKLEIKGGGGSGGGGSGGGGSQVQLQESGPGLVKPSETLSLTC | |
| | | TVSGVSLPDYGVSWIRQPPGKGLEWIGVIWGSETTYYNSSLKSRVTIS | |
| | | KDNSKNQVSLKLSSVTAADTAVYYCAKHYYYGGSYAMDYWGQGTLVTV | |
| | | SS | |
| CD19 | Hu | QVQLQESGPGLVKPSETLSLTCTVSGVSLPDYGVSWIRQPPGKGLEWI | 172 |
| | scFv12 | GVIWGSETTYYNSSLKSRVTISKDNSKNQVSLKLSSVTAADTAVYYCA | |
| | | KHYYYGGSYAMDYWGQGTLVTVSSGGGGSGGGGSGGGGSEIVMTQSPA | |
| | | TLSLSPGERATLSCRASQDISKYLNWYQQKPGQAPRLLIYHTSRLHSG | |
| | | IPARFSGSGSGTDYTLTISSLQPEDFAVYFCQQGNTLPYTFGQGTKLE | |
| | | IK | |

[0505] The sequences of the CDR sequences of the scFv domains of the CD19 antigen binding domains provided in Table 4 are shown in Table 5 for the heavy chain variable domains and in Table 6 for the light chain variable domains. “ID” stands for the respective SEQ ID NO for each CDR.

TABLE 5
Heavy Chain Variable Domain CDRs

| Description | FW | HCDR1 | ID | HCDR2 | ID | HCDR3 | ID |
|---|---|---|---|---|---|---|---|
| murine_CART19 | | GVSLPDYGVS | 176 | VIWGSETTYYNSALKS | 177 | HYYYGGSYAMDY | 181 |
| humanized_CART19a | VH4 | GVSLPDYGVS | 176 | VIWGSETTYYSSSLKS | 178 | HYYYGGSYAMDY | 181 |
| humanized_CART19b | VH4 | GVSLPDYGVS | 176 | VIWGSETTYYQSSLKS | 179 | HYYYGGSYAMDY | 181 |
| humanized_CART19c | VH4 | GVSLPDYGVS | 176 | VIWGSETTYYNSSLKS | 180 | HYYYGGSYAMDY | 181 |

TABLE 6
Light Chain Variable Domain CDRs

| Description | FW | LCDR1 | ID | LCDR2 | ID | LCDR3 | ID |
|---|---|---|---|---|---|---|---|
| murine_CART19 | | RASQDISKYLN | 182 | HTSRLHS | 183 | QQGNTLPYT | 184 |
| humanized_CART19a | VK3 | RASQDISKYLN | 182 | HTSRLHS | 183 | QQGNTLPYT | 184 |
| humanized_CART19b | VK3 | RASQDISKYLN | 182 | HTSRLHS | 183 | QQGNTLPYT | 184 |
| humanized_CART19c | VK3 | RASQDISKYLN | 182 | HTSRLHS | 183 | QQGNTLPYT | 184 |

[0506] In an embodiment, the antigen binding domain comprises an anti-CD19 antibody, or fragment thereof, e.g., an scFv. For example, the antigen binding domain comprises a variable heavy chain and/or a variable light chain listed in Table 7. The linker sequence joining the variable heavy and variable light chains can be any of the linker sequences described herein, or alternatively, can be GSTSGSGKPGSGEGSTKG (SEQ ID NO: 38). The light chain variable region and heavy chain variable region of a scFv can be, e.g., in any of the following orientations: light chain variable region-linker-heavy chain variable region or heavy chain variable region-linker-light chain variable region.

TABLE 7
Additional Anti-CD19 antibody binding domains

| Ab | | |
|---|---|---|
| Name | VH Sequence | VL Sequence |
| SJ25-C1 | QVQLLESGAELVRPGSSVKISCKASG | ELVLTQSPKFMSTSVGDRVSVTCKASQNV |
| | YAFSSYWMNWVKQRPGQGLEWIGQIY | GTNVAWYQQKPGQSPKPLIYSATYRNSGV |
| | PGDGDTNYNGKFKGQATLTADKSSST | PDRFTGSGSGTDFTLTITNVQSKDLADYF |
| | AYMQLSGLTSEDSAVYSCARKTISSV | YFCQYNRYPYTSGGGTKLEIKRRS (SEQ |
| | VDFYFDYWGQGTTVT (SEQ ID | ID NO: 174) |
| | NO: 173) | |
| | ScFv Sequence | |

| | |
|---|---|
| SJ25-C1 | QVQLLESGAELVRPGSSVKISCKASGYAFSSYWMNWVKQRPGQGLEWIGQIYPGDGD |
| scFv | TNYNGKFKGQATLTADKSSSTAYMQLSGLTSEDSAVYSCARKTISSVVDFYFDYWGQ |
| | GTTVTGSTSGSGKPGSGEGSTKGELVLTQSPKFMSTSVGDRVSVTCKASQNVGTNVA |
| | WYQQKPGQSPKPLIYSATYRNSGVPDRFTGSGSGTDFTLTITNVQSKDLADYFYFCQ |
| | YNRYPYTSGGGTKLEIKRRS (SEQ ID NO: 175) |

[0507] In one embodiment, the CD19 binding domain comprises one or more (e.g., all three) light chain complementary determining region 1 (LC CDR1), light chain complementary determining region 2 (LC CDR2), and light chain complementary determining region 3 (LC CDR3) of a CD19 binding domain described herein, e.g., provided in Table 4 or 6, and/or one or more (e.g., all three) heavy chain complementary determining region 1 (HC CDR1), heavy chain complementary determining region 2 (HC CDR2), and heavy chain complementary determining region 3 (HC CDR3) of a CD19 binding domain described herein, e.g., provided in Table 4 or 5. In one embodiment, the CD19 binding domain comprises one, two, or all of LC CDR1, LC CDR2, and LC CDR3 of any amino acid sequences as provided in Table 6, incorporated herein by reference; and one, two or all of HC CDR1, HC CDR2, and HC CDR3 of any amino acid sequences as provided in Table 5.

[0508] In one embodiment, the CD19 antigen binding domain comprises:
[0509] (i) (a) a LC CDR1 amino acid sequence of SEQ ID NO: 182, a LC CDR2 amino acid sequence of SEQ ID NO: 183, and a LC CDR3 amino acid sequence of SEQ ID NO: 184; and
   [0510] (b) a HC CDR1 amino acid sequence of SEQ ID NO: 176, a HC CDR2 amino acid sequence of SEQ ID NO: 177, and a HC CDR3 amino acid sequence of SEQ ID NO: 181
[0511] (ii) (a) a LC CDR1 amino acid sequence of SEQ ID NO: 182, a LC CDR2 amino acid sequence of SEQ ID NO: 183, and a LC CDR3 amino acid sequence of SEQ ID NO: 184; and
   [0512] (b) a HC CDR1 amino acid sequence of SEQ ID NO: 176, a HC CDR2 amino acid sequence of SEQ ID NO: 178, and a HC CDR3 amino acid sequence of SEQ ID NO: 181;
[0513] (iii) (a) a LC CDR1 amino acid sequence of SEQ ID NO: 182, a LC CDR2 amino acid sequence of SEQ ID NO: 183, and a LC CDR3 amino acid sequence of SEQ ID NO: 184; and
   [0514] (b) a HC CDR1 amino acid sequence of SEQ ID NO: 176, a HC CDR2 amino acid sequence of SEQ ID NO: 179, and a HC CDR3 amino acid sequence of SEQ ID NO: 181; or
[0515] (iv) (a) a LC CDR1 amino acid sequence of SEQ ID NO: 182, a LC CDR2 amino acid sequence of SEQ ID NO: 183, and a LC CDR3 amino acid sequence of SEQ ID NO: 184; and
   [0516] (b) a HC CDR1 amino acid sequence of SEQ ID NO: 176, a HC CDR2 amino acid sequence of SEQ ID NO: 180, and a HC CDR3 amino acid sequence of SEQ ID NO: 181.

[0517] In one embodiment, the CD19 binding domain comprises a light chain variable region described herein (e.g., in Table 4 or 7) and/or a heavy chain variable region described herein (e.g., in Table 4 or 7). In one embodiment, the CD19 binding domain is a scFv comprising a light chain and a heavy chain of an amino acid sequence listed in Table 4 or 7. In an embodiment, the CD19 binding domain (e.g., an scFv) comprises: a light chain variable region comprising an amino acid sequence having at least one, two or three modifications (e.g., substitutions, e.g., conservative substitutions) but not more than 30, 20 or 10 modifications (e.g., substitutions, e.g., conservative substitutions) of an amino acid sequence of a light chain variable region provided in Table 4 or 7, or a sequence with 95-99% identity with an amino acid sequence provided in Table 4 or 7; and/or a heavy chain variable region comprising an amino acid sequence having at least one, two or three modifications (e.g., substitutions, e.g., conservative substitutions) but not more than 30, 20 or 10 modifications (e.g., substitutions, e.g., conservative substitutions) of an amino acid sequence of a heavy chain variable region provided in Table 4 or 7, or a sequence with 95-99% identity to an amino acid sequence provided in Table 4 or 7.

[0518] In one embodiment, the CD19 binding domain comprises an amino acid sequence selected from a group consisting of SEQ ID NO: 161; SEQ ID NO: 162, SEQ ID NO: 163; SEQ ID NO: 164; SEQ ID NO: 165; SEQ ID NO: 166; SEQ ID NO: 167, SEQ ID NO: 168, SEQ ID NO: 169, SEQ ID NO: 170, SEQ ID NO: 171, SEQ ID NO: 172, SEQ ID NO: 160, and SEQ ID NO: 175; or an amino acid sequence having at least one, two or three modifications (e.g., substitutions, e.g., conservative substitutions) but not more than 30, 20 or 10 modifications (e.g., substitutions, e.g., conservative substitutions) to any of the aforesaid sequences; or a sequence with 95-99% identity to any of the aforesaid sequences. In one embodiment, the CD19 binding domain is a scFv, and a light chain variable region comprising an amino acid sequence described herein, e.g., in Table 4 or 7, is attached to a heavy chain variable region comprising an amino acid sequence described herein, e.g., in Table 4 or 7, via a linker, e.g., a linker described herein. In one embodiment, the CD19 binding domain includes a (Gly4-Ser) n linker, wherein n is 1, 2, 3, 4, 5, or 6 (SEQ ID NO: 10561), preferably 3 (SEQ ID NO: 35). The light chain variable region and heavy chain variable region of a scFv can be, e.g., in any of the following orientations: light chain variable region-linker-heavy chain variable region or heavy chain variable region-linker-light chain variable region.

[0519] Any known CD19 CAR, e.g., the CD19 antigen binding domain of any known CD19 CAR, in the art can be used in accordance with the instant disclosure to construct a CAR. For example, LG-740; CD19 CAR described in the U.S. Pat. Nos. 8,399,645; 7,446,190; Xu et al., Leuk Lymphoma. 2013 54 (2): 255-260 (2012); Cruz et al., Blood 122 (17): 2965-2973 (2013); Brentjens et al., Blood, 118 (18): 4817-4828 (2011); Kochenderfer et al., Blood 116 (20): 4099-102 (2010); Kochenderfer et al., Blood 122 (25): 4129-39 (2013); and 16th Annu Meet Am Soc Gen Cell Ther (ASGCT) (May 15-18, Salt Lake City) 2013, Abst 10. In one embodiment, an antigen binding domain against CD19 comprises an antigen binding portion, e.g., the CDRs, of a CAR, antibody or antigen-binding fragment thereof described in, e.g., PCT publication WO2012/079000; PCT publication WO2014/153270; Kochenderfer, J. N. et al., J. Immunother. 32 (7), 689-702 (2009); Kochenderfer, J. N., et al., Blood, 116 (20), 4099-4102 (2010); PCT publication WO2014/031687; Bejcek, Cancer Research, 55, 2346-2351, 1995; or U.S. Pat. No. 7,446,190.

[0520] In an embodiment, the antigen-binding domain of CAR, e.g., a CAR expressed by a cell of the disclosure, binds to BCMA. BCMA is found preferentially expressed in mature B lymphocytes. In an embodiment, the antigen binding domain is a murine scFv domain that binds to human BCMA. In an embodiment, the antigen binding domain is a humanized antibody or antibody fragment, e.g., scFv domain, that binds human BCMA. In an embodiment, the antigen binding domain is a humanized and back-mutated antibody or antibody fragment, e.g., scFv domain, that binds human BCMA. In an embodiment, the antigen binding domain is a human antibody or antibody fragment that binds to human BCMA. Exemplary scFv domains (and their sequences, e.g., CDRs, VL and VH sequences) that bind to BCMA are provided in Table 8, Table 9, Table 10 and Table 11. The scFv domain sequences provided in Table 8 and Table 9 include a light chain variable region (VL) and a heavy chain variable region (VH). The VL and VH are attached by a linker, e.g., in the following orientation: VH-linker-VL.

TABLE 8
Antigen Binding domains that bind BCMA
The amino acid sequences of variable heavy chain and variable light chain
sequences for each scFv are also provided.

| | | |
|---|---|---|
| | SEQ | |
| Name/ | ID | |
| Description | NO: | Sequence |

139109

| | | |
|---|---|---|
| 139109-aa | 249 | EVQLVESGGGLVQPGGSLRLSCAVSGFALSNHGMSWVRRAPGKGLEWVSG |
| ScFv domain | | IVYSGSTYYAASVKGRFTISRDNSRNTLYLQMNSLRPEDTAIYYCSAHGG |
| | | ESDVWGQGTTVTVSSASGGGGSGGRASGGGGSDIQLTQSPSSLSASVGDR |
| | | VTITCRASQSISSYLNWYQQKPGKAPKLLIYAASSLQSGVPSRFSGSGSG |
| | | TDFTLTISSLQPEDFATYYCQQSYSTPYTFGQGTKVEIK |
| 139109-nt | 264 | GAAGTGCAATTGGTGGAATCAGGGGGAGGACTTGTGCAGCCTGGAGGATC |
| ScFv domain | | GCTGAGACTGTCATGTGCCGTGTCCGGCTTTGCCCTGTCCAACCACGGGA |
| | | TGTCCTGGGTCCGCCGCGCGCCTGGAAAGGGCCTCGAATGGGTGTCGGGT |
| | | ATTGTGTACAGCGGTAGCACCTACTATGCCGCATCCGTGAAGGGGAGATT |
| | | CACCATCAGCCGGGACAACTCCAGGAACACTCTGTACCTCCAAATGAATT |
| | | CGCTGAGGCCAGAGGACACTGCCATCTACTACTGCTCCGCGCATGGCGGA |
| | | GAGTCCGACGTCTGGGGACAGGGGACCACCGTGACCGTGTCTAGCGCGTC |
| | | CGGCGGAGGCGGCAGCGGGGGTCGGGCATCAGGGGGCGGCGGATCGGACA |
| | | TCCAGCTCACCCAGTCCCCGAGCTCGCTGTCCGCCTCCGTGGGAGATCGG |
| | | GTCACCATCACGTGCCGCGCCAGCCAGTCGATTTCCTCCTACCTGAACTG |
| | | GTACCAACAGAAGCCCGGAAAAGCCCCGAAGCTTCTCATCTACGCCGCCT |
| | | CGAGCCTGCAGTCAGGAGTGCCCTCACGGTTCTCCGGCTCCGGTTCCGGT |
| | | ACTGATTTCACCCTGACCATTTCCTCCCTGCAACCGGAGGACTTCGCTAC |
| | | TTACTACTGCCAGCAGTCGTACTCCACCCCCTACACTTTCGGACAAGGCA |
| | | CCAAGGTCGAAATCAAG |
| 139109-aa | 279 | EVQLVESGGGLVQPGGSLRLSCAVSGFALSNHGMSWVRRAPGKGLEWVSG |
| VH | | IVYSGSTYYAASVKGRFTISRDNSRNTLYLQMNSLRPEDTAIYYCSAHGG |
| | | ESDVWGQGTTVTVSS |
| 139109-aa | 294 | DIQLTQSPSSLSASVGDRVTITCRASQSISSYLNWYQQKPGKAPKLLIYA |
| VL | | ASSLQSGVPSRFSGSGSGTDFTLTISSLQPEDFATYYCQQSYSTPYTFGQ |
| | | GTKVEIK |

139103

| | | |
|---|---|---|
| 139103-aa | 239 | QVQLVESGGGLVQPGRSLRLSCAASGFTFSNYAMSWVRQAPGKGLGWVSG |
| ScFv domain | | ISRSGENTYYADSVKGRFTISRDNSKNTLYLQMNSLRDEDTAVYYCARSP |
| | | AHYYGGMDVWGQGTTVTVSSASGGGGSGGRASGGGGSDIVLTQSPGTLSL |
| | | SPGERATLSCRASQSISSSFLAWYQQKPGQAPRLLIYGASRRATGIPDRF |
| | | SGSGSGTDFTLTISRLEPEDSAVYYCQQYHSSPSWTFGQGTKLEIK |
| 139103-nt | 254 | CAAGTGCAACTCGTGGAATCTGGTGGAGGACTCGTGCAACCCGGAAGATC |
| ScFv domain | | GCTTAGACTGTCGTGTGCCGCCAGCGGGTTCACTTTCTCGAACTACGCGA |
| | | TGTCCTGGGTCCGCCAGGCACCCGGAAAGGGACTCGGTTGGGTGTCCGGC |
| | | ATTTCCCGGTCCGGCGAAAATACCTACTACGCCGACTCCGTGAAGGGCCG |
| | | CTTCACCATCTCAAGGGACAACAGCAAAAACACCCTGTACTTGCAAATGA |
| | | ACTCCCTGCGGGATGAAGATACAGCCGTGTACTATTGCGCCCGGTCGCCT |
| | | GCCCATTACTACGGCGGAATGGACGTCTGGGGACAGGGAACCACTGTGAC |
| | | TGTCAGCAGCGCGTCGGGTGGCGGCGGCTCAGGGGGTCGGGCCTCCGGGG |
| | | GGGGAGGGTCCGACATCGTGCTGACCCAGTCCCCGGGAACCCTGAGCCTG |
| | | AGCCCGGGAGAGCGCGCGACCCTGTCATGCCGGGCATCCCAGAGCATTAG |
| | | CTCCTCCTTTCTCGCCTGGTATCAGCAGAAGCCCGGACAGGCCCCGAGGC |
| | | TGCTGATCTACGGCGCTAGCAGAAGGGCTACCGGAATCCCAGACCGGTTC |
| | | TCCGGCTCCGGTTCCGGGACCGATTTCACCCTTACTATCTCGCGCCTGGA |
| | | ACCTGAGGACTCCGCCGTCTACTACTGCCAGCAGTACCACTCATCCCCGT |
| | | CGTGGACGTTCGGACAGGGCACCAAGCTGGAGATTAAG |
| 139103-aa | 269 | QVQLVESGGGLVQPGRSLRLSCAASGFTFSNYAMSWVRQAPGKGLGWVSG |
| VH | | ISRSGENTYYADSVKGRFTISRDNSKNTLYLQMNSLRDEDTAVYYCARSP |
| | | AHYYGGMDVWGQGTTVTVSS |
| 139103-aa | 284 | DIVLTQSPGTLSLSPGERATLSCRASQSISSSFLAWYQQKPGQAPRLLIY |
| VL | | GASRRATGIPDRFSGSGSGTDFTLTISRLEPEDSAVYYCQQYHSSPSWTF |
| | | GQGTKLEIK |

139105

| | | |
|---|---|---|
| 139105-aa | 240 | QVQLVESGGGLVQPGRSLRLSCAASGFTFDDYAMHWVRQAPGKGLEWVSG |
| ScFv domain | | ISWNSGSIGYADSVKGRFTISRDNAKNSLYLQMNSLRAEDTALYYCSVHS |
| | | FLAYWGQGTLVTVSSASGGGGSGGRASGGGGSDIVMTQTPLSLPVTPGEP |
| | | ASISCRSSQSLLHSNGYNYLDWYLQKPGQSPQLLIYLGSNRASGVPDRFS |
| | | GSGSGTDFTLKISRVEAEDVGVYYCMQALQTPYTFGQGTKVEIK |
| 139105-nt | 255 | CAAGTGCAACTCGTCGAATCCGGTGGAGGTCTGGTCCAACCTGGTAGAAG |
| ScFv domain | | CCTGAGACTGTCGTGTGCGGCCAGCGGATTCACCTTTGATGACTATGCTA |
| | | TGCACTGGGTGCGGCAGGCCCCAGGAAAGGGCCTGGAATGGGTGTCGGGA |
| | | ATTAGCTGGAACTCCGGGTCCATTGGCTACGCCGACTCCGTGAAGGGCCG |
| | | CTTCACCATCTCCCGCGACAACGCAAAGAACTCCCTGTACTTGCAAATGA |
| | | ACTCGCTCAGGGCTGAGGATACCGCGCTGTACTACTGCTCCGTGCATTCC |
| | | TTCCTGGCCTACTGGGGACAGGGAACTCTGGTCACCGTGTCGAGCGCCTC |
| | | CGGCGGCGGGGGCTCGGGTGGACGGGCCTCGGGCGGAGGGGGGTCCGACA |
| | | TCGTGATGACCCAGACCCCGCTGAGCTTGCCCGTGACTCCCGGAGAGCCT |
| | | GCATCCATCTCCTGCCGGTCATCCCAGTCCCTTCTCCACTCCAACGGATA |
| | | CAACTACCTCGACTGGTACCTCCAGAAGCCGGGACAGAGCCCTCAGCTTC |
| | | TGATCTACCTGGGGTCAAATAGAGCCTCAGGAGTGCCGGATCGGTTCAGC |
| | | GGATCTGGTTCGGGAACTGATTTCACTCTGAAGATTTCCCGCGTGGAAGC |
| | | CGAGGACGTGGGCGTCTACTACTGTATGCAGGCGCTGCAGACCCCCTATA |
| | | CCTTCGGCCAAGGGACGAAAGTGGAGATCAAG |
| 139105-aa | 270 | QVQLVESGGGLVQPGRSLRLSCAASGFTFDDYAMHWVRQAPGKGLEWVSG |
| VH | | ISWNSGSIGYADSVKGRFTISRDNAKNSLYLQMNSLRAEDTALYYCSVHS |
| | | FLAYWGQGTLVTVSS |
| 139105-aa | 285 | DIVMTQTPLSLPVTPGEPASISCRSSQSLLHSNGYNYLDWYLQKPGQSPQ |
| VL | | LLIYLGSNRASGVPDRFSGSGSGTDFTLKISRVEAEDVGVYYCMQALQTP |
| | | YTFGQGTKVEIK |

139111

| | | |
|---|---|---|
| 139111-aa | 241 | EVQLLESGGGLVQPGGSLRLSCAVSGFALSNHGMSWVRRAPGKGLEWVSG |
| ScFv domain | | IVYSGSTYYAASVKGRFTISRDNSRNTLYLQMNSLRPEDTAIYYCSAHGG |
| | | ESDVWGQGTTVTVSSASGGGGSGGRASGGGGSDIVMTQTPLSLSVTPGQP |
| | | ASISCKSSQSLLRNDGKTPLYWYLQKAGQPPQLLIYEVSNRFSGVPDRFS |
| | | GSGSGTDFTLKISRVEAEDVGAYYCMQNIQFPSFGGGTKLEIK |
| 139111-nt | 256 | GAAGTGCAATTGTTGGAATCTGGAGGAGGACTTGTGCAGCCTGGAGGATC |
| ScFv domain | | ACTGAGACTTTCGTGTGCGGTGTCAGGCTTCGCCCTGAGCAACCACGGCA |
| | | TGAGCTGGGTGCGGAGAGCCCCGGGGAAGGGTCTGGAATGGGTGTCCGGG |
| | | ATCGTCTACTCCGGTTCAACTTACTACGCCGCAAGCGTGAAGGGTCGCTT |
| | | CACCATTTCCCGCGATAACTCCCGGAACACCCTGTACCTCCAAATGAACT |
| | | CCCTGCGGCCCGAGGACACCGCCATCTACTACTGTTCCGCGCATGGAGGA |
| | | GAGTCCGATGTCTGGGGACAGGGCACTACCGTGACCGTGTCGAGCGCCTC |
| | | GGGGGGAGGAGGCTCCGGCGGTCGCGCCTCCGGGGGGGGTGGCAGCGACA |
| | | TTGTGATGACGCAGACTCCACTCTCGCTGTCCGTGACCCCGGGACAGCCC |
| | | GCGTCCATCTCGTGCAAGAGCTCCCAGAGCCTGCTGAGGAACGACGGAAA |
| | | GACTCCTCTGTATTGGTACCTCCAGAAGGCTGGACAGCCCCCGCAACTGC |
| | | TCATCTACGAAGTGTCAAATCGCTTCTCCGGGGTGCCGGATCGGTTTTCC |
| | | GGCTCGGGATCGGGCACCGACTTCACCCTGAAAATCTCCAGGGTCGAGGC |
| | | CGAGGACGTGGGAGCCTACTACTGCATGCAAAACATCCAGTTCCCTTCCT |
| | | TCGGCGGCGGCACAAAGCTGGAGATTAAG |
| 139111-aa | 271 | EVQLLESGGGLVQPGGSLRLSCAVSGFALSNHGMSWVRRAPGKGLEWVSG |
| VH | | IVYSGSTYYAASVKGRFTISRDNSRNTLYLQMNSLRPEDTAIYYCSAHGG |
| | | ESDVWGQGTTVTVSS |
| 139111-aa | 286 | DIVMTQTPLSLSVTPGQPASISCKSSQSLLRNDGKTPLYWYLQKAGQPPQ |
| VL | | LLIYEVSNRFSGVPDRFSGSGSGTDFTLKISRVEAEDVGAYYCMQNIQFP |
| | | SFGGGTKLEIK |

139100

| | | |
|---|---|---|
| 139100-aa | 242 | QVQLVQSGAEVRKTGASVKVSCKASGYIFDNFGINWVRQAPGQGLEWMGW |
| ScFv domain | | INPKNNNTNYAQKFQGRVTITADESTNTAYMEVSSLRSEDTAVYYCARGP |
| | | YYYQSYMDVWGQGTMVTVSSASGGGGSGGRASGGGGSDIVMTQTPLSLPV |
| | | TPGEPASISCRSSQSLLHSNGYNYLNWYLQKPGQSPQLLIYLGSKRASGV |
| | | PDRFSGSGSGTDFTLHITRVGAEDVGVYYCMQALQTPYTFGQGTKLEIK |
| 139100-nt | 257 | CAAGTCCAACTCGTCCAGTCCGGCGCAGAAGTCAGAAAAACCGGTGCTAG |
| ScFv domain | | CGTGAAAGTGTCCTGCAAGGCCTCCGGCTACATTTTCGATAACTTCGGAA |
| | | TCAACTGGGTCAGACAGGCCCCGGGCCAGGGGCTGGAATGGATGGGATGG |
| | | ATCAACCCCAAGAACAACAACACCAACTACGCACAGAAGTTCCAGGGCCG |
| | | CGTGACTATCACCGCCGATGAATCGACCAATACCGCCTACATGGAGGTGT |
| | | CCTCCCTGCGGTCGGAGGACACTGCCGTGTATTACTGCGCGAGGGGCCCA |
| | | TACTACTACCAAAGCTACATGGACGTCTGGGGACAGGGAACCATGGTGAC |
| | | CGTGTCATCCGCCTCCGGTGGTGGAGGCTCCGGGGGGCGGGCTTCAGGAG |
| | | GCGGAGGAAGCGATATTGTGATGACCCAGACTCCGCTTAGCCTGCCCGTG |
| | | ACTCCTGGAGAACCGGCCTCCATTTCCTGCCGGTCCTCGCAATCACTCCT |
| | | GCATTCCAACGGTTACAACTACCTGAATTGGTACCTCCAGAAGCCTGGCC |
| | | AGTCGCCCCAGTTGCTGATCTATCTGGGCTCGAAGCGCGCCTCCGGGGTG |
| | | CCTGACCGGTTTAGCGGATCTGGGAGCGGCACGGACTTCACTCTCCACAT |
| | | CACCCGCGTGGGAGCGGAGGACGTGGGAGTGTACTACTGTATGCAGGCGC |
| | | TGCAGACTCCGTACACATTCGGACAGGGCACCAAGCTGGAGATCAAG |
| 139100-aa | 272 | QVQLVQSGAEVRKTGASVKVSCKASGYIFDNFGINWVRQAPGQGLEWMGW |
| VH | | INPKNNNTNYAQKFQGRVTITADESTNTAYMEVSSLRSEDTAVYYCARGP |
| | | YYYQSYMDVWGQGTMVTVSS |
| 139100-aa | 287 | DIVMTQTPLSLPVTPGEPASISCRSSQSLLHSNGYNYLNWYLQKPGQSPQ |
| VL | | LLIYLGSKRASGVPDRFSGSGSGTDFTLHITRVGAEDVGVYYCMQALQTP |
| | | YTFGQGTKLEIK |

139101

| | | |
|---|---|---|
| 139101-aa | 243 | QVQLQESGGGLVQPGGSLRLSCAASGFTFSSDAMTWVRQAPGKGLEWVSV |
| ScFv domain | | ISGSGGTTYYADSVKGRFTISRDNSKNTLYLQMNSLRAEDTAVYYCAKLD |
| | | SSGYYYARGPRYWGQGTLVTVSSASGGGGSGGRASGGGGSDIQLTQSPSS |
| | | LSASVGDRVTITCRASQSISSYLNWYQQKPGKAPKLLIYGASTLASGVPA |
| | | RFSGSGSGTHFTLTINSLQSEDSATYYCQQSYKRASFGQGTKVEIK |
| 139101-nt | 258 | CAAGTGCAACTTCAAGAATCAGGCGGAGGACTCGTGCAGCCCGGAGGATC |
| ScFv domain | | ATTGCGGCTCTCGTGCGCCGCCTCGGGCTTCACCTTCTCGAGCGACGCCA |
| | | TGACCTGGGTCCGCCAGGCCCCGGGGAAGGGGCTGGAATGGGTGTCTGTG |
| | | ATTTCCGGCTCCGGGGGAACTACGTACTACGCCGATTCCGTGAAAGGTCG |
| | | CTTCACTATCTCCCGGGACAACAGCAAGAACACCCTTTATCTGCAAATGA |
| | | ATTCCCTCCGCGCCGAGGACACCGCCGTGTACTACTGCGCCAAGCTGGAC |
| | | TCCTCGGGCTACTACTATGCCCGGGGTCCGAGATACTGGGGACAGGGAAC |
| | | CCTCGTGACCGTGTCCTCCGCGTCCGGCGGAGGAGGGTCGGGAGGGCGGG |
| | | CCTCCGGCGGCGGCGGTTCGGACATCCAGCTGACCCAGTCCCCATCCTCA |
| | | CTGAGCGCAAGCGTGGGCGACAGAGTCACCATTACATGCAGGGCGTCCCA |
| | | GAGCATCAGCTCCTACCTGAACTGGTACCAACAGAAGCCTGGAAAGGCTC |
| | | CTAAGCTGTTGATCTACGGGGCTTCGACCCTGGCATCCGGGGTGCCCGCG |
| | | AGGTTTAGCGGAAGCGGTAGCGGCACTCACTTCACTCTGACCATTAACAG |
| | | CCTCCAGTCCGAGGATTCAGCCACTTACTACTGTCAGCAGTCCTACAAGC |
| | | GGGCCAGCTTCGGACAGGGCACTAAGGTCGAGATCAAG |
| 139101-aa | 273 | QVQLQESGGGLVQPGGSLRLSCAASGFTFSSDAMTWVRQAPGKGLEWVSV |
| VH | | ISGSGGTTYYADSVKGRFTISRDNSKNTLYLQMNSLRAEDTAVYYCAKLD |
| | | SSGYYYARGPRYWGQGTLVTVSS |
| 139101-aa | 288 | DIQLTQSPSSLSASVGDRVTITCRASQSISSYLNWYQQKPGKAPKLLIYG |
| VL | | ASTLASGVPARFSGSGSGTHFTLTINSLQSEDSATYYCQQSYKRASEGQG |
| | | TKVEIK |

139102

| | | |
|---|---|---|
| 139102-aa | 244 | QVQLVQSGAEVKKPGASVKVSCKASGYTFSNYGITWVRQAPGQGLEWMGW |
| ScFv domain | | ISAYNGNTNYAQKFQGRVTMTRNTSISTAYMELSSLRSEDTAVYYCARGP |
| | | YYYYMDVWGKGTMVTVSSASGGGGSGGRASGGGGSEIVMTQSPLSLPVTP |
| | | GEPASISCRSSQSLLYSNGYNYVDWYLQKPGQSPQLLIYLGSNRASGVPD |
| | | RFSGSGSGTDFKLQISRVEAEDVGIYYCMQGRQFPYSFGQGTKVEIK |
| 139102-nt | 259 | CAAGTCCAACTGGTCCAGAGCGGTGCAGAAGTGAAGAAGCCCGGAGCGAG |
| ScFv domain | | CGTGAAAGTGTCCTGCAAGGCTTCCGGGTACACCTTCTCCAACTACGGCA |
| | | TCACTTGGGTGCGCCAGGCCCCGGGACAGGGCCTGGAATGGATGGGGTGG |
| | | ATTTCCGCGTACAACGGCAATACGAACTACGCTCAGAAGTTCCAGGGTAG |
| | | AGTGACCATGACTAGGAACACCTCCATTTCCACCGCCTACATGGAACTGT |
| | | CCTCCCTGCGGAGCGAGGACACCGCCGTGTACTATTGCGCCCGGGGACCA |
| | | TACTACTACTACATGGATGTCTGGGGGAAGGGGACTATGGTCACCGTGTC |
| | | ATCCGCCTCGGGAGGCGGCGGATCAGGAGGACGCGCCTCTGGTGGTGGAG |
| | | GATCGGAGATCGTGATGACCCAGAGCCCTCTCTCCTTGCCCGTGACTCCT |
| | | GGGGAGCCCGCATCCATTTCATGCCGGAGCTCCCAGTCACTTCTCTACTC |
| | | CAACGGCTATAACTACGTGGATTGGTACCTCCAAAAGCCGGGCCAGAGCC |
| | | CGCAGCTGCTGATCTACCTGGGCTCGAACAGGGCCAGCGGAGTGCCTGAC |
| | | CGGTTCTCCGGGTCGGGAAGCGGGACCGACTTCAAGCTGCAAATCTCGAG |
| | | AGTGGAGGCCGAGGACGTGGGAATCTACTACTGTATGCAGGGCCGCCAGT |
| | | TTCCGTACTCGTTCGGACAGGGCACCAAAGTGGAAATCAAG |
| 139102-aa | 274 | QVQLVQSGAEVKKPGASVKVSCKASGYTFSNYGITWVRQAPGQGLEWMGW |
| VH | | ISAYNGNTNYAQKFQGRVTMTRNTSISTAYMELSSLRSEDTAVYYCARGP |
| | | YYYYMDVWGKGTMVTVSS |
| 139102-aa | 289 | EIVMTQSPLSLPVTPGEPASISCRSSQSLLYSNGYNYVDWYLQKPGQSPQ |
| VL | | LLIYLGSNRASGVPDRFSGSGSGTDFKLQISRVEAEDVGIYYCMQGRQFP |
| | | YSFGQGTKVEIK |

139104

| | | |
|---|---|---|
| 139104-aa | 245 | EVQLLETGGGLVQPGGSLRLSCAVSGFALSNHGMSWVRRAPGKGLEWVSG |
| ScFv domain | | IVYSGSTYYAASVKGRFTISRDNSRNTLYLQMNSLRPEDTAIYYCSAHGG |
| | | ESDVWGQGTTVTVSSASGGGGSGGRASGGGGSEIVLTQSPATLSVSPGES |
| | | ATLSCRASQSVSSNLAWYQQKPGQAPRLLIYGASTRASGIPDRFSGSGSG |
| | | TDFTLTISSLQAEDVAVYYCQQYGSSLTFGGGTKVEIK |
| 139104-nt | 260 | GAAGTGCAATTGCTCGAAACTGGAGGAGGTCTGGTGCAACCTGGAGGATC |
| ScFv domain | | ACTTCGCCTGTCCTGCGCCGTGTCGGGCTTTGCCCTGTCCAACCATGGAA |
| | | TGAGCTGGGTCCGCCGCGCGCCGGGGAAGGGCCTCGAATGGGTGTCCGGC |
| | | ATCGTCTACTCCGGCTCCACCTACTACGCCGCGTCCGTGAAGGGCCGGTT |
| | | CACGATTTCACGGGACAACTCGCGGAACACCCTGTACCTCCAAATGAATT |
| | | CCCTTCGGCCGGAGGATACTGCCATCTACTACTGCTCCGCCCACGGTGGC |
| | | GAATCCGACGTCTGGGGCCAGGGAACCACCGTGACCGTGTCCAGCGCGTC |
| | | CGGGGGAGGAGGAAGCGGGGGTAGAGCATCGGGTGGAGGCGGATCAGAGA |
| | | TCGTGCTGACCCAGTCCCCCGCCACCTTGAGCGTGTCACCAGGAGAGTCC |
| | | GCCACCCTGTCATGCCGCGCCAGCCAGTCCGTGTCCTCCAACCTGGCTTG |
| | | GTACCAGCAGAAGCCGGGGCAGGCCCCTAGACTCCTGATCTATGGGGCGT |
| | | CGACCCGGGCATCTGGAATTCCCGATAGGTTCAGCGGATCGGGCTCGGGC |
| | | ACTGACTTCACTCTGACCATCTCCTCGCTGCAAGCCGAGGACGTGGCTGT |
| | | GTACTACTGTCAGCAGTACGGAAGCTCCCTGACTTTCGGTGGCGGGACCA |
| | | AAGTCGAGATTAAG |
| 139104-aa | 275 | EVQLLETGGGLVQPGGSLRLSCAVSGFALSNHGMSWVRRAPGKGLEWVSG |
| VH | | IVYSGSTYYAASVKGRFTISRDNSRNTLYLQMNSLRPEDTAIYYCSAHGG |
| | | ESDVWGQGTTVTVSS |
| 139104-aa | 290 | EIVLTQSPATLSVSPGESATLSCRASQSVSSNLAWYQQKPGQAPRLLIYG |
| VL | | ASTRASGIPDRFSGSGSGTDFTLTISSLQAEDVAVYYCQQYGSSLTFGGG |
| | | TKVEIK |

139106

| | | |
|---|---|---|
| 139106-aa | 246 | EVQLVETGGGLVQPGGSLRLSCAVSGFALSNHGMSWVRRAPGKGLEWVSG |
| ScFv domain | | IVYSGSTYYAASVKGRFTISRDNSRNTLYLQMNSLRPEDTAIYYCSAHGG |
| | | ESDVWGQGTTVTVSSASGGGGSGGRASGGGGSEIVMTQSPATLSVSPGER |
| | | ATLSCRASQSVSSKLAWYQQKPGQAPRLLMYGASIRATGIPDRFSGSGSG |
| | | TEFTLTISSLEPEDFAVYYCQQYGSSSWTFGQGTKVEIK |
| 139106-nt | 261 | GAAGTGCAATTGGTGGAAACTGGAGGAGGACTTGTGCAACCTGGAGGATC |
| ScFv domain | | ATTGAGACTGAGCTGCGCAGTGTCGGGATTCGCCCTGAGCAACCATGGAA |
| | | TGTCCTGGGTCAGAAGGGCCCCTGGAAAAGGCCTCGAATGGGTGTCAGGG |
| | | ATCGTGTACTCCGGTTCCACTTACTACGCCGCCTCCGTGAAGGGGCGCTT |
| | | CACTATCTCACGGGATAACTCCCGCAATACCCTGTACCTCCAAATGAACA |
| | | GCCTGCGGCCGGAGGATACCGCCATCTACTACTGTTCCGCCCACGGTGGA |
| | | GAGTCTGACGTCTGGGGCCAGGGAACTACCGTGACCGTGTCCTCCGCGTC |
| | | CGGCGGTGGAGGGAGCGGCGGCCGCGCCAGCGGCGGCGGAGGCTCCGAGA |
| | | TCGTGATGACCCAGAGCCCCGCTACTCTGTCGGTGTCGCCCGGAGAAAGG |
| | | GCGACCCTGTCCTGCCGGGCGTCGCAGTCCGTGAGCAGCAAGCTGGCTTG |
| | | GTACCAGCAGAAGCCGGGCCAGGCACCACGCCTGCTTATGTACGGTGCCT |
| | | CCATTCGGGCCACCGGAATCCCGGACCGGTTCTCGGGGTCGGGGTCCGGT |
| | | ACCGAGTTCACACTGACCATTTCCTCGCTCGAGCCCGAGGACTTTGCCGT |
| | | CTATTACTGCCAGCAGTACGGCTCCTCCTCATGGACGTTCGGCCAGGGGA |
| | | CCAAGGTCGAAATCAAG |
| 139106-aa | 276 | EVQLVETGGGLVQPGGSLRLSCAVSGFALSNHGMSWVRRAPGKGLEWVSG |
| VH | | IVYSGSTYYAASVKGRFTISRDNSRNTLYLQMNSLRPEDTAIYYCSAHGG |
| | | ESDVWGQGTTVTVSS |
| 139106-aa | 291 | EIVMTQSPATLSVSPGERATLSCRASQSVSSKLAWYQQKPGQAPRLLMYG |
| VL | | ASIRATGIPDRFSGSGSGTEFTLTISSLEPEDFAVYYCQQYGSSSWTFGQ |
| | | GTKVEIK |

139107

| | | |
|---|---|---|
| 139107-aa | 247 | EVQLVETGGGVVQPGGSLRLSCAVSGFALSNHGMSWVRRAPGKGLEWVSG |
| ScFv domain | | IVYSGSTYYAASVKGRFTISRDNSRNTLYLQMNSLRPEDTAIYYCSAHGG |
| | | ESDVWGQGTTVTVSSASGGGGSGGRASGGGGSEIVLTQSPGTLSLSPGER |
| | | ATLSCRASQSVGSTNLAWYQQKPGQAPRLLIYDASNRATGIPDRFSGGGS |
| | | GTDFTLTISRLEPEDFAVYYCQQYGSSPPWTFGQGTKVEIK |
| 139107-nt | 262 | GAAGTGCAATTGGTGGAGACTGGAGGAGGAGTGGTGCAACCTGGAGGAAG |
| ScFv domain | | CCTGAGACTGTCATGCGCGGTGTCGGGCTTCGCCCTCTCCAACCACGGAA |
| | | TGTCCTGGGTCCGCCGGGCCCCTGGGAAAGGACTTGAATGGGTGTCCGGC |
| | | ATCGTGTACTCGGGTTCCACCTACTACGCGGCCTCAGTGAAGGGCCGGTT |
| | | TACTATTAGCCGCGACAACTCCAGAAACACACTGTACCTCCAAATGAACT |
| | | CGCTGCGGCCGGAAGATACCGCTATCTACTACTGCTCCGCCCATGGGGGA |
| | | GAGTCGGACGTCTGGGGACAGGGCACCACTGTCACTGTGTCCAGCGCTTC |
| | | CGGCGGTGGTGGAAGCGGGGGACGGGCCTCAGGAGGCGGTGGCAGCGAGA |
| | | TTGTGCTGACCCAGTCCCCCGGGACCCTGAGCCTGTCCCCGGGAGAAAGG |
| | | GCCACCCTCTCCTGTCGGGCATCCCAGTCCGTGGGGTCTACTAACCTTGC |
| | | ATGGTACCAGCAGAAGCCCGGCCAGGCCCCTCGCCTGCTGATCTACGACG |
| | | CGTCCAATAGAGCCACCGGCATCCCGGATCGCTTCAGCGGAGGCGGATCG |
| | | GGCACCGACTTCACCCTCACCATTTCAAGGCTGGAACCGGAGGACTTCGC |
| | | CGTGTACTACTGCCAGCAGTATGGTTCGTCCCCACCCTGGACGTTCGGCC |
| | | AGGGGACTAAGGTCGAGATCAAG |
| 139107-aa | 277 | EVQLVETGGGVVQPGGSLRLSCAVSGFALSNHGMSWVRRAPGKGLEWVSG |
| VH | | IVYSGSTYYAASVKGRFTISRDNSRNTLYLQMNSLRPEDTAIYYCSAHGG |
| | | ESDVWGQGTTVTVSS |
| 139107-aa | 292 | EIVLTQSPGTLSLSPGERATLSCRASQSVGSTNLAWYQQKPGQAPRLLIY |
| VL | | DASNRATGIPDRFSGGGSGTDFTLTISRLEPEDFAVYYCQQYGSSPPWTF |
| | | GQGTKVEIK |

139108

| | | |
|---|---|---|
| 139108-aa | 248 | QVQLVESGGGLVKPGGSLRLSCAASGFTFSDYYMSWIRQAPGKGLEWVSY |
| ScFv domain | | ISSSGSTIYYADSVKGRFTISRDNAKNSLYLQMNSLRAEDTAVYYCARES |
| | | GDGMDVWGQGTTVTVSSASGGGGSGGRASGGGGSDIQMTQSPSSLSASVG |
| | | DRVTITCRASQSISSYLNWYQQKPGKAPKLLIYAASSLQSGVPSRFSGSG |
| | | SGTDFTLTISSLQPEDFATYYCQQSYTLAFGQGTKVDIK |
| 139108-nt | 263 | CAAGTGCAACTCGTGGAATCTGGTGGAGGACTCGTGAAACCTGGAGGATC |
| ScFv domain | | ATTGAGACTGTCATGCGCGGCCTCGGGATTCACGTTCTCCGATTACTACA |
| | | TGAGCTGGATTCGCCAGGCTCCGGGGAAGGGACTGGAATGGGTGTCCTAC |
| | | ATTTCCTCATCCGGCTCCACCATCTACTACGCGGACTCCGTGAAGGGGAG |
| | | ATTCACCATTAGCCGCGATAACGCCAAGAACAGCCTGTACCTTCAGATGA |
| | | ACTCCCTGCGGGCTGAAGATACTGCCGTCTACTACTGCGCAAGGGAGAGC |
| | | GGAGATGGGATGGACGTCTGGGGACAGGGTACCACTGTGACCGTGTCGTC |
| | | GGCCTCCGGCGGAGGGGGTTCGGGTGGAAGGGCCAGCGGCGGCGGAGGCA |
| | | GCGACATCCAGATGACCCAGTCCCCCTCATCGCTGTCCGCCTCCGTGGGC |
| | | GACCGCGTCACCATCACATGCCGGGCCTCACAGTCGATCTCCTCCTACCT |
| | | CAATTGGTATCAGCAGAAGCCCGGAAAGGCCCCTAAGCTTCTGATCTACG |
| | | CAGCGTCCTCCCTGCAATCCGGGGTCCCATCTCGGTTCTCCGGCTCGGGC |
| | | AGCGGTACCGACTTCACTCTGACCATCTCGAGCCTGCAGCCGGAGGACTT |
| | | CGCCACTTACTACTGTCAGCAAAGCTACACCCTCGCGTTTGGCCAGGGCA |
| | | CCAAAGTGGACATCAAG |
| 139108-aa | 278 | QVQLVESGGGLVKPGGSLRLSCAASGFTFSDYYMSWIRQAPGKGLEWVSY |
| VH | | ISSSGSTIYYADSVKGRFTISRDNAKNSLYLQMNSLRAEDTAVYYCARES |
| | | GDGMDVWGQGTTVTVSS |
| 139108-aa | 293 | DIQMTQSPSSLSASVGDRVTITCRASQSISSYLNWYQQKPGKAPKLLIYA |
| VL | | ASSLQSGVPSRFSGSGSGTDFTLTISSLQPEDFATYYCQQSYTLAFGQGT |
| | | KVDIK |

139110

| | | |
|---|---|---|
| 139110-aa | 250 | QVQLVQSGGGLVKPGGSLRLSCAASGFTFSDYYMSWIRQAPGKGLEWVSY |
| ScFv domain | | ISSSGNTIYYADSVKGRFTISRDNAKNSLYLQMNSLRAEDTAVYYCARST |
| | | MVREDYWGQGTLVTVSSASGGGGSGGRASGGGGSDIVLTQSPLSLPVTLG |
| | | QPASISCKSSESLVHNSGKTYLNWFHQRPGQSPRRLIYEVSNRDSGVPDR |
| | | FTGSGSGTDFTLKISRVEAEDVGVYYCMQGTHWPGTFGQGTKLEIK |
| 139110-nt | 265 | CAAGTGCAACTGGTGCAAAGCGGAGGAGGATTGGTCAAACCCGGAGGAAG |
| ScFv domain | | CCTGAGACTGTCATGCGCGGCCTCTGGATTCACCTTCTCCGATTACTACA |
| | | TGTCATGGATCAGACAGGCCCCGGGGAAGGGCCTCGAATGGGTGTCCTAC |
| | | ATCTCGTCCTCCGGGAACACCATCTACTACGCCGACAGCGTGAAGGGCCG |
| | | CTTTACCATTTCCCGCGACAACGCAAAGAACTCGCTGTACCTTCAGATGA |
| | | ATTCCCTGCGGGCTGAAGATACCGCGGTGTACTATTGCGCCCGGTCCACT |
| | | ATGGTCCGGGAGGACTACTGGGGACAGGGCACACTCGTGACCGTGTCCAG |
| | | CGCGAGCGGGGGTGGAGGCAGCGGTGGACGCGCCTCCGGCGGCGGCGGTT |
| | | CAGACATCGTGCTGACTCAGTCGCCCCTGTCGCTGCCGGTCACCCTGGGC |
| | | CAACCGGCCTCAATTAGCTGCAAGTCCTCGGAGAGCCTGGTGCACAACTC |
| | | AGGAAAGACTTACCTGAACTGGTTCCATCAGCGGCCTGGACAGTCCCCAC |
| | | GGAGGCTCATCTATGAAGTGTCCAACAGGGATTCGGGGGTGCCCGACCGC |
| | | TTCACTGGCTCCGGGTCCGGCACCGACTTCACCTTGAAAATCTCCAGAGT |
| | | GGAAGCCGAGGACGTGGGCGTGTACTACTGTATGCAGGGTACCCACTGGC |
| | | CTGGAACCTTTGGACAAGGAACTAAGCTCGAGATTAAG |
| 139110-aa | 280 | QVQLVQSGGGLVKPGGSLRLSCAASGFTFSDYYMSWIRQAPGKGLEWVSY |
| VH | | ISSSGNTIYYADSVKGRFTISRDNAKNSLYLQMNSLRAEDTAVYYCARST |
| | | MVREDYWGQGTLVTVSS |
| 139110-aa | 295 | DIVLTQSPLSLPVTLGQPASISCKSSESLVHNSGKTYLNWFHQRPGQSPR |
| VL | | RLIYEVSNRDSGVPDRFTGSGSGTDFTLKISRVEAEDVGVYYCMQGTHWP |
| | | GTFGQGTKLEIK |

139112

| | | |
|---|---|---|
| 139112-aa | 251 | QVQLVESGGGLVQPGGSLRLSCAVSGFALSNHGMSWVRRAPGKGLEWVSG |
| ScFv domain | | IVYSGSTYYAASVKGRFTISRDNSRNTLYLQMNSLRPEDTAIYYCSAHGG |
| | | ESDVWGQGTTVTVSSASGGGGSGGRASGGGGSDIRLTQSPSPLSASVGDR |
| | | VTITCQASEDINKFLNWYHQTPGKAPKLLIYDASTLQTGVPSRFSGSGSG |
| | | TDFTLTINSLQPEDIGTYYCQQYESLPLTFGGGTKVEIK |
| 139112-nt | 266 | CAAGTGCAACTCGTGGAATCTGGTGGAGGACTCGTGCAACCCGGTGGAAG |
| ScFv domain | | CCTTAGGCTGTCGTGCGCCGTCAGCGGGTTTGCTCTGAGCAACCATGGAA |
| | | TGTCCTGGGTCCGCCGGGCACCGGGAAAAGGGCTGGAATGGGTGTCCGGC |
| | | ATCGTGTACAGCGGGTCAACCTATTACGCCGCGTCCGTGAAGGGCAGATT |
| | | CACTATCTCAAGAGACAACAGCCGGAACACCCTGTACTTGCAAATGAATT |
| | | CCCTGCGCCCCGAGGACACCGCCATCTACTACTGCTCCGCCCACGGAGGA |
| | | GAGTCGGACGTGTGGGGCCAGGGAACGACTGTGACTGTGTCCAGCGCATC |
| | | AGGAGGGGGTGGTTCGGGCGGCCGGGCCTCGGGGGGAGGAGGTTCCGACA |
| | | TTCGGCTGACCCAGTCCCCGTCCCCACTGTCGGCCTCCGTCGGCGACCGC |
| | | GTGACCATCACTTGTCAGGCGTCCGAGGACATTAACAAGTTCCTGAACTG |
| | | GTACCACCAGACCCCTGGAAAGGCCCCCAAGCTGCTGATCTACGATGCCT |
| | | CGACCCTTCAAACTGGAGTGCCTAGCCGGTTCTCCGGGTCCGGCTCCGGC |
| | | ACTGATTTCACTCTGACCATCAACTCATTGCAGCCGGAAGATATCGGGAC |
| | | CTACTATTGCCAGCAGTACGAATCCCTCCCGCTCACATTCGGCGGGGGAA |
| | | CCAAGGTCGAGATTAAG |
| 139112-aa | 281 | QVQLVESGGGLVQPGGSLRLSCAVSGFALSNHGMSWVRRAPGKGLEWVSG |
| VH | | IVYSGSTYYAASVKGRFTISRDNSRNTLYLQMNSLRPEDTAIYYCSAHGG |
| | | ESDVWGQGTTVTVSS |
| 139112-aa | 296 | DIRLTQSPSPLSASVGDRVTITCQASEDINKELNWYHQTPGKAPKLLIYD |
| VL | | ASTLQTGVPSRFSGSGSGTDFTLTINSLQPEDIGTYYCQQYESLPLTFGG |
| | | GTKVEIK |

139113

| | | |
|---|---|---|
| 139113-aa | 252 | EVQLVETGGGLVQPGGSLRLSCAVSGFALSNHGMSWVRRAPGKGLEWVSG |
| ScFv domain | | IVYSGSTYYAASVKGRFTISRDNSRNTLYLQMNSLRPEDTAIYYCSAHGG |
| | | ESDVWGQGTTVTVSSASGGGGSGGRASGGGGSETTLTQSPATLSVSPGER |
| | | ATLSCRASQSVGSNLAWYQQKPGQGPRLLIYGASTRATGIPARFSGSGSG |
| | | TEFTLTISSLQPEDFAVYYCQQYNDWLPVTFGQGTKVEIK |
| 139113-nt | 267 | GAAGTGCAATTGGTGGAAACTGGAGGAGGACTTGTGCAACCTGGAGGATC |
| ScFv domain | | ATTGCGGCTCTCATGCGCTGTCTCCGGCTTCGCCCTGTCAAATCACGGGA |
| | | TGTCGTGGGTCAGACGGGCCCCGGGAAAGGGTCTGGAATGGGTGTCGGGG |
| | | ATTGTGTACAGCGGCTCCACCTACTACGCCGCTTCGGTCAAGGGCCGCTT |
| | | CACTATTTCACGGGACAACAGCCGCAACACCCTCTATCTGCAAATGAACT |
| | | CTCTCCGCCCGGAGGATACCGCCATCTACTACTGCTCCGCACACGGCGGC |
| | | GAATCCGACGTGTGGGGACAGGGAACCACTGTCACCGTGTCGTCCGCATC |
| | | CGGTGGCGGAGGATCGGGTGGCCGGGCCTCCGGGGGCGGCGGCAGCGAGA |
| | | CTACCCTGACCCAGTCCCCTGCCACTCTGTCCGTGAGCCCGGGAGAGAGA |
| | | GCCACCCTTAGCTGCCGGGCCAGCCAGAGCGTGGGCTCCAACCTGGCCTG |
| | | GTACCAGCAGAAGCCAGGACAGGGTCCCAGGCTGCTGATCTACGGAGCCT |
| | | CCACTCGCGCGACCGGCATCCCCGCGAGGTTCTCCGGGTCGGGTTCCGGG |
| | | ACCGAGTTCACCCTGACCATCTCCTCCCTCCAACCGGAGGACTTCGCGGT |
| | | GTACTACTGTCAGCAGTACAACGATTGGCTGCCCGTGACATTTGGACAGG |
| | | GGACGAAGGTGGAAATCAAA |
| 139113-aa | 282 | EVQLVETGGGLVQPGGSLRLSCAVSGFALSNHGMSWVRRAPGKGLEWVSG |
| VH | | IVYSGSTYYAASVKGRFTISRDNSRNTLYLQMNSLRPEDTAIYYCSAHGG |
| | | ESDVWGQGTTVTVSS |
| 139113-aa | 297 | ETTLTQSPATLSVSPGERATLSCRASQSVGSNLAWYQQKPGQGPRLLIYG |
| VL | | ASTRATGIPARFSGSGSGTEFTLTISSLQPEDFAVYYCQQYNDWLPVTFG |
| | | QGTKVEIK |

139114

| | | |
|---|---|---|
| 139114-aa | 253 | EVQLVESGGGLVQPGGSLRLSCAVSGFALSNHGMSWVRRAPGKGLEWVSG |
| ScFv domain | | IVYSGSTYYAASVKGRFTISRDNSRNTLYLQMNSLRPEDTAIYYCSAHGG |
| | | ESDVWGQGTTVTVSSASGGGGSGGRASGGGGSEIVLTQSPGTLSLSPGER |
| | | ATLSCRASQSIGSSSLAWYQQKPGQAPRLLMYGASSRASGIPDRFSGSGS |
| | | GTDFTLTISRLEPEDFAVYYCQQYAGSPPFTFGQGTKVEIK |
| 139114-nt | 268 | GAAGTGCAATTGGTGGAATCTGGTGGAGGACTTGTGCAACCTGGAGGATC |
| ScFv domain | | ACTGAGACTGTCATGCGCGGTGTCCGGTTTTGCCCTGAGCAATCATGGGA |
| | | TGTCGTGGGTCCGGCGCGCCCCCGGAAAGGGTCTGGAATGGGTGTCGGGT |
| | | ATCGTCTACTCCGGGAGCACTTACTACGCCGCGAGCGTGAAGGGCCGCTT |
| | | CACCATTTCCCGCGATAACTCCCGCAACACCCTGTACTTGCAAATGAACT |
| | | CGCTCCGGCCTGAGGACACTGCCATCTACTACTGCTCCGCACACGGAGGA |
| | | GAATCCGACGTGTGGGGCCAGGGAACTACCGTGACCGTCAGCAGCGCCTC |
| | | CGGCGGCGGGGGCTCAGGCGGACGGGCTAGCGGCGGCGGTGGCTCCGAGA |
| | | TCGTGCTGACCCAGTCGCCTGGCACTCTCTCGCTGAGCCCCGGGGAAAGG |
| | | GCAACCCTGTCCTGTCGGGCCAGCCAGTCCATTGGATCATCCTCCCTCGC |
| | | CTGGTATCAGCAGAAACCGGGACAGGCTCCGCGGCTGCTTATGTATGGGG |
| | | CCAGCTCAAGAGCCTCCGGCATTCCCGACCGGTTCTCCGGGTCCGGTTCC |
| | | GGCACCGATTTCACCCTGACTATCTCGAGGCTGGAGCCAGAGGACTTCGC |
| | | CGTGTACTACTGCCAGCAGTACGCGGGGTCCCCGCCGTTCACGTTCGGAC |
| | | AGGGAACCAAGGTCGAGATCAAG |
| 139114-aa | 283 | EVQLVESGGGLVQPGGSLRLSCAVSGFALSNHGMSWVRRAPGKGLEWVSG |
| VH | | IVYSGSTYYAASVKGRFTISRDNSRNTLYLQMNSLRPEDTAIYYCSAHGG |
| | | ESDVWGQGTTVTVSS |
| 139114-aa | 298 | EIVLTQSPGTLSLSPGERATLSCRASQSIGSSSLAWYQQKPGQAPRLLMY |
| VL | | GASSRASGIPDRFSGSGSGTDFTLTISRLEPEDFAVYYCQQYAGSPPFTF |
| | | GQGTKVEIK |

149362

| | | |
|---|---|---|
| 149362-aa | 329 | QVQLQESGPGLVKPSETLSLTCTVSGGSISSSYYYWGWIRQPPGKGLEWI |
| ScFv domain | | GSIYYSGSAYYNPSLKSRVTISVDTSKNQFSLRLSSVTAADTAVYYCARH |
| | | WQEWPDAFDIWGQGTMVTVSSGGGGSGGGGSGGGGSETTLTQSPAFMSAT |
| | | PGDKVIISCKASQDIDDAMNWYQQKPGEAPLFIIQSATSPVPGIPPRFSG |
| | | SGFGTDFSLTINNIESEDAAYYFCLQHDNFPLTFGQGTKLEIK |
| 149362-nt | 350 | CAAGTGCAGCTTCAGGAAAGCGGACCGGGCCTGGTCAAGCCATCCGAAAC |
| ScFv domain | | TCTCTCCCTGACTTGCACTGTGTCTGGCGGTTCCATCTCATCGTCGTACT |
| | | ACTACTGGGGCTGGATTAGGCAGCCGCCCGGAAAGGGACTGGAGTGGATC |
| | | GGAAGCATCTACTATTCCGGCTCGGCGTACTACAACCCTAGCCTCAAGTC |
| | | GAGAGTGACCATCTCCGTGGATACCTCCAAGAACCAGTTTTCCCTGCGCC |
| | | TGAGCTCCGTGACCGCCGCTGACACCGCCGTGTACTACTGTGCTCGGCAT |
| | | TGGCAGGAATGGCCCGATGCCTTCGACATTTGGGGCCAGGGCACTATGGT |
| | | CACTGTGTCATCCGGGGGTGGAGGCAGCGGGGGAGGAGGGTCCGGGGGGG |
| | | GAGGTTCAGAGACAACCTTGACCCAGTCACCCGCATTCATGTCCGCCACT |
| | | CCGGGAGACAAGGTCATCATCTCGTGCAAAGCGTCCCAGGATATCGACGA |
| | | TGCCATGAATTGGTACCAGCAGAAGCCTGGCGAAGCGCCGCTGTTCATTA |
| | | TCCAATCCGCAACCTCGCCCGTGCCTGGAATCCCACCGCGGTTCAGCGGC |
| | | AGCGGTTTCGGAACCGACTTTTCCCTGACCATTAACAACATTGAGTCCGA |
| | | GGACGCCGCCTACTACTTCTGCCTGCAACACGACAACTTCCCTCTCACGT |
| | | TCGGCCAGGGAACCAAGCTGGAAATCAAG |
| 149362-aa VH | 371 | QVQLQESGPGLVKPSETLSLTCTVSGGSISSSYYYWGWIRQPPGKGLEWI |
| | | GSIYYSGSAYYNPSLKSRVTISVDTSKNQFSLRLSSVTAADTAVYYCARH |
| | | WQEWPDAFDIWGQGTMVTVSS |
| 149362-aa VL | 392 | ETTLTQSPAFMSATPGDKVIISCKASQDIDDAMNWYQQKPGEAPLFIIQS |
| | | ATSPVPGIPPRFSGSGFGTDFSLTINNIESEDAAYYFCLQHDNFPLTFGQ |
| | | GTKLEIK |

149363

| | | |
|---|---|---|
| 149363-aa | 330 | QVNLRESGPALVKPTQTLTLTCTFSGFSLRTSGMCVSWIRQPPGKALEWL |
| ScFv domain | | ARIDWDEDKFYSTSLKTRLTISKDTSDNQVVLRMTNMDPADTATYYCARS |
| | | GAGGTSATAFDIWGPGTMVTVSSGGGGSGGGGSGGGGSDIQMTQSPSSLS |
| | | ASVGDRVTITCRASQDIYNNLAWFQLKPGSAPRSLMYAANKSQSGVPSRF |
| | | SGSASGTDFTLTISSLQPEDFATYYCQHYYRFPYSFGQGTKLEIK |
| 149363-nt | 351 | CAAGTCAATCTGCGCGAATCCGGCCCCGCCTTGGTCAAGCCTACCCAGAC |
| ScFv domain | | CCTCACTCTGACCTGTACTTTCTCCGGCTTCTCCCTGCGGACTTCCGGGA |
| | | TGTGCGTGTCCTGGATCAGACAGCCTCCGGGAAAGGCCCTGGAGTGGCTC |
| | | GCTCGCATTGACTGGGATGAGGACAAGTTCTACTCCACCTCACTCAAGAC |
| | | CAGGCTGACCATCAGCAAAGATACCTCTGACAACCAAGTGGTGCTCCGCA |
| | | TGACCAACATGGACCCAGCCGACACTGCCACTTACTACTGCGCGAGGAGC |
| | | GGAGCGGGCGGAACCTCCGCCACCGCCTTCGATATTTGGGGCCCGGGTAC |
| | | CATGGTCACCGTGTCAAGCGGAGGAGGGGGGTCCGGGGGCGGCGGTTCCG |
| | | GGGGAGGCGGATCGGACATTCAGATGACTCAGTCACCATCGTCCCTGAGC |
| | | GCTAGCGTGGGCGACAGAGTGACAATCACTTGCCGGGCATCCCAGGACAT |
| | | CTATAACAACCTTGCGTGGTTCCAGCTGAAGCCTGGTTCCGCACCGCGGT |
| | | CACTTATGTACGCCGCCAACAAGAGCCAGTCGGGAGTGCCGTCCCGGTTT |
| | | TCCGGTTCGGCCTCGGGAACTGACTTCACCCTGACGATCTCCAGCCTGCA |
| | | ACCCGAGGATTTCGCCACCTACTACTGCCAGCACTACTACCGCTTTCCCT |
| | | ACTCGTTCGGACAGGGAACCAAGCTGGAAATCAAG |
| 149363-aa VH | 372 | QVNLRESGPALVKPTQTLTLTCTFSGFSLRTSGMCVSWIRQPPGKALEWL |
| | | ARIDWDEDKFYSTSLKTRLTISKDTSDNQVVLRMTNMDPADTATYYCARS |
| | | GAGGTSATAFDIWGPGTMVTVSS |
| 149363-aa VL | 393 | DIQMTQSPSSLSASVGDRVTITCRASQDIYNNLAWFQLKPGSAPRSLMYA |
| | | ANKSQSGVPSRFSGSASGTDFTLTISSLQPEDFATYYCQHYYRFPYSFGQ |
| | | GTKLEIK |

149364

| | | |
|---|---|---|
| 149364-aa | 331 | EVQLVESGGGLVKPGGSLRLSCAASGFTFSSYSMNWVRQAPGKGLEWVSS |
| ScFv domain | | ISSSSSYIYYADSVKGRFTISRDNAKNSLYLQMNSLRAEDTAVYYCAKTI |
| | | AAVYAFDIWGQGTTVTVSSGGGGSGGGGSGGGGSEIVLTQSPLSLPVTPE |
| | | EPASISCRSSQSLLHSNGYNYLDWYLQKPGQSPQLLIYLGSNRASGVPDR |
| | | FSGSGSGTDFTLKISRVEAEDVGVYYCMQALQTPYTFGQGTKLEIK |
| 149364-nt | 352 | GAAGTGCAGCTTGTCGAATCCGGGGGGGGACTGGTCAAGCCGGGCGGATC |
| ScFv domain | | ACTGAGACTGTCCTGCGCCGCGAGCGGCTTCACGTTCTCCTCCTACTCCA |
| | | TGAACTGGGTCCGCCAAGCCCCCGGGAAGGGACTGGAATGGGTGTCCTCT |
| | | ATCTCCTCGTCGTCGTCCTACATCTACTACGCCGACTCCGTGAAGGGAAG |
| | | ATTCACCATTTCCCGCGACAACGCAAAGAACTCACTGTACTTGCAAATGA |
| | | ACTCACTCCGGGCCGAAGATACTGCTGTGTACTATTGCGCCAAGACTATT |
| | | GCCGCCGTCTACGCTTTCGACATCTGGGGCCAGGGAACCACCGTGACTGT |
| | | GTCGTCCGGTGGTGGTGGCTCGGGCGGAGGAGGAAGCGGCGGCGGGGGGT |
| | | CCGAGATTGTGCTGACCCAGTCGCCACTGAGCCTCCCTGTGACCCCCGAG |
| | | GAACCCGCCAGCATCAGCTGCCGGTCCAGCCAGTCCCTGCTCCACTCCAA |
| | | CGGATACAATTACCTCGATTGGTACCTTCAGAAGCCTGGACAAAGCCCGC |
| | | AGCTGCTCATCTACTTGGGATCAAACCGCGCGTCAGGAGTGCCTGACCGG |
| | | TTCTCCGGCTCGGGCAGCGGTACCGATTTCACCCTGAAAATCTCCAGGGT |
| | | GGAGGCAGAGGACGTGGGAGTGTATTACTGTATGCAGGCGCTGCAGACTC |
| | | CGTACACATTTGGGCAGGGCACCAAGCTGGAGATCAAG |
| 149364-aa VH | 373 | EVQLVESGGGLVKPGGSLRLSCAASGFTFSSYSMNWVRQAPGKGLEWVSS |
| | | ISSSSSYIYYADSVKGRFTISRDNAKNSLYLQMNSLRAEDTAVYYCAKTI |
| | | AAVYAFDIWGQGTTVTVSS |
| 149364-aa VL | 394 | EIVLTQSPLSLPVTPEEPASISCRSSQSLLHSNGYNYLDWYLQKPGQSPQ |
| | | LLIYLGSNRASGVPDRFSGSGSGTDFTLKISRVEAEDVGVYYCMQALQTP |
| | | YTFGQGTKLEIK |

149365

| | | |
|---|---|---|
| 149365-aa | 332 | EVQLVESGGGLVKPGGSLRLSCAASGFTFSDYYMSWIRQAPGKGLEWVSY |
| ScFv domain | | ISSSGSTIYYADSVKGRFTISRDNAKNSLYLQMNSLRAEDTAVYYCARDL |
| | | RGAFDIWGQGTMVTVSSGGGGSGGGGSGGGGSSYVLTQSPSVSAAPGYTA |
| | | TISCGGNNIGTKSVHWYQQKPGQAPLLVIRDDSVRPSKIPGRFSGSNSGN |
| | | MATLTISGVQAGDEADFYCQVWDSDSEHVVFGGGTKLTVL |
| 149365-nt | 353 | GAAGTCCAGCTCGTGGAGTCCGGCGGAGGCCTTGTGAAGCCTGGAGGTTC |
| ScFv domain | | GCTGAGACTGTCCTGCGCCGCCTCCGGCTTCACCTTCTCCGACTACTACA |
| | | TGTCCTGGATCAGACAGGCCCCGGGAAAGGGCCTGGAATGGGTGTCCTAC |
| | | ATCTCGTCATCGGGCAGCACTATCTACTACGCGGACTCAGTGAAGGGGCG |
| | | GTTCACCATTTCCCGGGATAACGCGAAGAACTCGCTGTATCTGCAAATGA |
| | | ACTCACTGAGGGCCGAGGACACCGCCGTGTACTACTGCGCCCGCGATCTC |
| | | CGCGGGGCATTTGACATCTGGGGACAGGGAACCATGGTCACAGTGTCCAG |
| | | CGGAGGGGGAGGATCGGGTGGCGGAGGTTCCGGGGGTGGAGGCTCCTCCT |
| | | ACGTGCTGACTCAGAGCCCAAGCGTCAGCGCTGCGCCCGGTTACACGGCA |
| | | ACCATCTCCTGTGGCGGAAACAACATTGGGACCAAGTCTGTGCACTGGTA |
| | | TCAGCAGAAGCCGGGCCAAGCTCCCCTGTTGGTGATCCGCGATGACTCCG |
| | | TGCGGCCTAGCAAAATTCCGGGACGGTTCTCCGGCTCCAACAGCGGCAAT |
| | | ATGGCCACTCTCACCATCTCGGGAGTGCAGGCCGGAGATGAAGCCGACTT |
| | | CTACTGCCAAGTCTGGGACTCAGACTCCGAGCATGTGGTGTTCGGGGGCG |
| | | GAACCAAGCTGACTGTGCTC |
| 149365-aa VH | 374 | EVQLVESGGGLVKPGGSLRLSCAASGFTFSDYYMSWIRQAPGKGLEWVSY |
| | | ISSSGSTIYYADSVKGRFTISRDNAKNSLYLQMNSLRAEDTAVYYCARDL |
| | | RGAFDIWGQGTMVTVSS |
| 149365-aa VL | 395 | SYVLTQSPSVSAAPGYTATISCGGNNIGTKSVHWYQQKPGQAPLLVIRDD |
| | | SVRPSKIPGRFSGSNSGNMATLTISGVQAGDEADFYCQVWDSDSEHVVFG |
| | | GGTKLTVL |

149366

| | | |
|---|---|---|
| 149366-aa | 333 | QVQLVQSGAEVKKPGASVKVSCKPSGYTVTSHYIHWVRRAPGQGLEWMGM |
| ScFv domain | | INPSGGVTAYSQTLQGRVTMTSDTSSSTVYMELSSLRSEDTAMYYCAREG |
| | | SGSGWYFDFWGRGTLVTVSSGGGGSGGGGSGGGGSSYVLTQPPSVSVSPG |
| | | QTASITCSGDGLSKKYVSWYQQKAGQSPVVLISRDKERPSGIPDRFSGSN |
| | | SADTATLTISGTQAMDEADYYCQAWDDTTVVFGGGTKLTVL |
| 149366-nt | 354 | CAAGTGCAGCTGGTGCAGAGCGGGGCCGAAGTCAAGAAGCCGGGAGCCTC |
| ScFv domain | | CGTGAAAGTGTCCTGCAAGCCTTCGGGATACACCGTGACCTCCCACTACA |
| | | TTCATTGGGTCCGCCGCGCCCCCGGCCAAGGACTCGAGTGGATGGGCATG |
| | | ATCAACCCTAGCGGCGGAGTGACCGCGTACAGCCAGACGCTGCAGGGACG |
| | | CGTGACTATGACCTCGGATACCTCCTCCTCCACCGTCTATATGGAACTGT |
| | | CCAGCCTGCGGTCCGAGGATACCGCCATGTACTACTGCGCCCGGGAAGGA |
| | | TCAGGCTCCGGGTGGTATTTCGACTTCTGGGGAAGAGGCACCCTCGTGAC |
| | | TGTGTCATCTGGGGGAGGGGGTTCCGGTGGTGGCGGATCGGGAGGAGGCG |
| | | GTTCATCCTACGTGCTGACCCAGCCACCCTCCGTGTCCGTGAGCCCCGGC |
| | | CAGACTGCATCGATTACATGTAGCGGCGACGGCCTCTCCAAGAAATACGT |
| | | GTCGTGGTACCAGCAGAAGGCCGGACAGAGCCCGGTGGTGCTGATCTCAA |
| | | GAGATAAGGAGCGGCCTAGCGGAATCCCGGACAGGTTCTCGGGTTCCAAC |
| | | TCCGCGGACACTGCTACTCTGACCATCTCGGGGACCCAGGCTATGGACGA |
| | | AGCCGATTACTACTGCCAAGCCTGGGACGACACTACTGTCGTGTTTGGAG |
| | | GGGGCACCAAGTTGACCGTCCTT |
| 149366-aa VH | 375 | QVQLVQSGAEVKKPGASVKVSCKPSGYTVTSHYIHWVRRAPGQGLEWMGM |
| | | INPSGGVTAYSQTLQGRVTMTSDTSSSTVYMELSSLRSEDTAMYYCAREG |
| | | SGSGWYFDFWGRGTLVTVSS |
| 149366-aa VL | 396 | SYVLTQPPSVSVSPGQTASITCSGDGLSKKYVSWYQQKAGQSPVVLISRD |
| | | KERPSGIPDRFSGSNSADTATLTISGTQAMDEADYYCQAWDDTTVVEGGG |
| | | TKLTVL |

149367

| | | |
|---|---|---|
| 149367-aa | 334 | QVQLQESGPGLVKPSQTLSLTCTVSGGSISSGGYYWSWIRQHPGKGLEWI |
| ScFv domain | | GYIYYSGSTYYNPSLKSRVTISVDTSKNQFSLKLSSVTAADTAVYYCARA |
| | | GIAARLRGAFDIWGQGTMVTVSSGGGGSGGGGSGGGGSDIVMTQSPSSVS |
| | | ASVGDRVIITCRASQGIRNWLAWYQQKPGKAPNLLIYAASNLQSGVPSRF |
| | | SGSGSGADFTLTISSLQPEDVATYYCQKYNSAPFTFGPGTKVDIK |
| 149367-nt | 355 | CAAGTGCAGCTTCAGGAGAGCGGCCCGGGACTCGTGAAGCCGTCCCAGAC |
| ScFv domain | | CCTGTCCCTGACTTGCACCGTGTCGGGAGGAAGCATCTCGAGCGGAGGCT |
| | | ACTATTGGTCGTGGATTCGGCAGCACCCTGGAAAGGGCCTGGAATGGATC |
| | | GGCTACATCTACTACTCCGGCTCGACCTACTACAACCCATCGCTGAAGTC |
| | | CAGAGTGACAATCTCAGTGGACACGTCCAAGAATCAGTTCAGCCTGAAGC |
| | | TCTCTTCCGTGACTGCGGCCGACACCGCCGTGTACTACTGCGCACGCGCT |
| | | GGAATTGCCGCCCGGCTGAGGGGTGCCTTCGACATTTGGGGACAGGGCAC |
| | | CATGGTCACCGTGTCCTCCGGCGGCGGAGGTTCCGGGGGTGGAGGCTCAG |
| | | GAGGAGGGGGGTCCGACATCGTCATGACTCAGTCGCCCTCAAGCGTCAGC |
| | | GCGTCCGTCGGGGACAGAGTGATCATCACCTGTCGGGCGTCCCAGGGAAT |
| | | TCGCAACTGGCTGGCCTGGTATCAGCAGAAGCCCGGAAAGGCCCCCAACC |
| | | TGTTGATCTACGCCGCCTCAAACCTCCAATCCGGGGTGCCGAGCCGCTTC |
| | | AGCGGCTCCGGTTCGGGTGCCGATTTCACTCTGACCATCTCCTCCCTGCA |
| | | ACCTGAAGATGTGGCTACCTACTACTGCCAAAAGTACAACTCCGCACCTT |
| | | TTACTTTCGGACCGGGGACCAAAGTGGACATTAAG |
| 149367-aa VH | 376 | QVQLQESGPGLVKPSQTLSLTCTVSGGSISSGGYYWSWIRQHPGKGLEWI |
| | | GYIYYSGSTYYNPSLKSRVTISVDTSKNQFSLKLSSVTAADTAVYYCARA |
| | | GIAARLRGAFDIWGQGTMVTVSS |
| 149367-aa VL | 397 | DIVMTQSPSSVSASVGDRVIITCRASQGIRNWLAWYQQKPGKAPNLLIYA |
| | | ASNLQSGVPSRFSGSGSGADFTLTISSLQPEDVATYYCQKYNSAPFTFGP |
| | | GTKVDIK |

149368

| | | |
|---|---|---|
| 149368-aa | 335 | QVQLVQSGAEVKKPGSSVKVSCKASGGTFSSYAISWVRQAPGQGLEWMGG |
| ScFv domain | | IIPIFGTANYAQKFQGRVTITADESTSTAYMELSSLRSEDTAVYYCARRG |
| | | GYQLLRWDVGLLRSAFDIWGQGTMVTVSSGGGGSGGGGSGGGGSSYVLTQ |
| | | PPSVSVAPGQTARITCGGNNIGSKSVHWYQQKPGQAPVLVLYGKNNRPSG |
| | | VPDRFSGSRSGTTASLTITGAQAEDEADYYCSSRDSSGDHLRVFGTGTKV |
| | | TVL |
| 149368-nt | 356 | CAAGTGCAGCTGGTCCAGTCGGGCGCCGAGGTCAAGAAGCCCGGGAGCTC |
| ScFv domain | | TGTGAAAGTGTCCTGCAAGGCCTCCGGGGGCACCTTTAGCTCCTACGCCA |
| | | TCTCCTGGGTCCGCCAAGCACCGGGTCAAGGCCTGGAGTGGATGGGGGGA |
| | | ATTATCCCTATCTTCGGCACTGCCAACTACGCCCAGAAGTTCCAGGGACG |
| | | CGTGACCATTACCGCGGACGAATCCACCTCCACCGCTTATATGGAGCTGT |
| | | CCAGCTTGCGCTCGGAAGATACCGCCGTGTACTACTGCGCCCGGAGGGGT |
| | | GGATACCAGCTGCTGAGATGGGACGTGGGCCTCCTGCGGTCGGCGTTCGA |
| | | CATCTGGGGCCAGGGCACTATGGTCACTGTGTCCAGCGGAGGAGGCGGAT |
| | | CGGGAGGCGGCGGATCAGGGGGAGGCGGTTCCAGCTACGTGCTTACTCAA |
| | | CCCCCTTCGGTGTCCGTGGCCCCGGGACAGACCGCCAGAATCACTTGCGG |
| | | AGGAAACAACATTGGGTCCAAGAGCGTGCATTGGTACCAGCAGAAGCCAG |
| | | GACAGGCCCCTGTGCTGGTGCTCTACGGGAAGAACAATCGGCCCAGCGGA |
| | | GTGCCGGACAGGTTCTCGGGTTCACGCTCCGGTACAACCGCTTCACTGAC |
| | | TATCACCGGGGCCCAGGCAGAGGATGAAGCGGACTACTACTGTTCCTCCC |
| | | GGGATTCATCCGGCGACCACCTCCGGGTGTTCGGAACCGGAACGAAGGTC |
| | | ACCGTGCTG |
| 149368-aa VH | 377 | QVQLVQSGAEVKKPGSSVKVSCKASGGTFSSYAISWVRQAPGQGLEWMGG |
| | | IIPIFGTANYAQKFQGRVTITADESTSTAYMELSSLRSEDTAVYYCARRG |
| | | GYQLLRWDVGLLRSAFDIWGQGTMVTVSS |
| 149368-aa VL | 398 | SYVLTQPPSVSVAPGQTARITCGGNNIGSKSVHWYQQKPGQAPVLVLYGK |
| | | NNRPSGVPDRFSGSRSGTTASLTITGAQAEDEADYYCSSRDSSGDHLRVF |
| | | GTGTKVTVL |

149369

| | | |
|---|---|---|
| 149369-aa | 336 | EVQLQQSGPGLVKPSQTLSLTCAISGDSVSSNSAAWNWIRQSPSRGLEWL |
| ScFv domain | | GRTYYRSKWYSFYAISLKSRIIINPDTSKNQFSLQLKSVTPEDTAVYYCA |
| | | RSSPEGLFLYWEDPWGQGTLVTVSSGGDGSGGGGSGGGGSSSELTQDPAV |
| | | SVALGQTIRITCQGDSLGNYYATWYQQKPGQAPVLVIYGTNNRPSGIPDR |
| | | FSASSSGNTASLTITGAQAEDEADYYCNSRDSSGHHLLFGTGTKVTVL |
| 149369-nt | 357 | GAAGTGCAGCTCCAACAGTCAGGACCGGGGCTCGTGAAGCCATCCCAGAC |
| ScFv domain | | CCTGTCCCTGACTTGTGCCATCTCGGGAGATAGCGTGTCATCGAACTCCG |
| | | CCGCCTGGAACTGGATTCGGCAGAGCCCGTCCCGCGGACTGGAGTGGCTT |
| | | GGAAGGACCTACTACCGGTCCAAGTGGTACTCTTTCTACGCGATCTCGCT |
| | | GAAGTCCCGCATTATCATTAACCCTGATACCTCCAAGAATCAGTTCTCCC |
| | | TCCAACTGAAATCCGTCACCCCCGAGGACACAGCAGTGTATTACTGCGCA |
| | | CGGAGCAGCCCCGAAGGACTGTTCCTGTATTGGTTTGACCCCTGGGGCCA |
| | | GGGGACTCTTGTGACCGTGTCGAGCGGCGGAGATGGGTCCGGTGGCGGTG |
| | | GTTCGGGGGGCGGCGGATCATCATCCGAACTGACCCAGGACCCGGCTGTG |
| | | TCCGTGGCGCTGGGACAAACCATCCGCATTACGTGCCAGGGAGACTCCCT |
| | | GGGCAACTACTACGCCACTTGGTACCAGCAGAAGCCGGGCCAAGCCCCTG |
| | | TGTTGGTCATCTACGGGACCAACAACAGACCTTCCGGCATCCCCGACCGG |
| | | TTCAGCGCTTCGTCCTCCGGCAACACTGCCAGCCTGACCATCACTGGAGC |
| | | GCAGGCCGAAGATGAGGCCGACTACTACTGCAACAGCAGAGACTCCTCGG |
| | | GTCATCACCTCTTGTTCGGAACTGGAACCAAGGTCACCGTGCTG |
| 149369-aa VH | 378 | EVQLQQSGPGLVKPSQTLSLTCAISGDSVSSNSAAWNWIRQSPSRGLEWL |
| | | GRTYYRSKWYSFYAISLKSRIIINPDTSKNQFSLQLKSVTPEDTAVYYCA |
| | | RSSPEGLFLYWFDPWGQGTLVTVSS |
| 149369-aa VL | 399 | SSELTQDPAVSVALGQTIRITCQGDSLGNYYATWYQQKPGQAPVLVIYGT |
| | | NNRPSGIPDRFSASSSGNTASLTITGAQAEDEADYYCNSRDSSGHHLLFG |
| | | TGTKVTVL |

BCMA_EBB-C1978-A4

| | | |
|---|---|---|
| BCMA_EBB- | 337 | EVQLVESGGGLVQPGGSLRLSCAASGFTFSSYAMSWVRQAPGKGLEWVSA |
| C1978-A4-aa | | ISGSGGSTYYADSVKGRFTISRDNSKNTLYLQMNSLRAEDTAVYYCAKVE |
| ScFv domain | | GSGSLDYWGQGTLVTVSSGGGGSGGGGSGGGGSEIVMTQSPGTLSLSPGE |
| | | RATLSCRASQSVSSAYLAWYQQKPGQPPRLLISGASTRATGIPDRFGGSG |
| | | SGTDFTLTISRLEPEDFAVYYCQHYGSSENGSSLFTFGQGTRLEIK |
| BCMA_EBB- | 358 | GAAGTGCAGCTCGTGGAGTCAGGAGGCGGCCTGGTCCAGCCGGGAGGGTC |
| C1978-A4-nt | | CCTTAGACTGTCATGCGCCGCAAGCGGATTCACTTTCTCCTCCTATGCCA |
| ScFv domain | | TGAGCTGGGTCCGCCAAGCCCCCGGAAAGGGACTGGAATGGGTGTCCGCC |
| | | ATCTCGGGGTCTGGAGGCTCAACTTACTACGCTGACTCCGTGAAGGGACG |
| | | GTTCACCATTAGCCGCGACAACTCCAAGAACACCCTCTACCTCCAAATGA |
| | | ACTCCCTGCGGGCCGAGGATACCGCCGTCTACTACTGCGCCAAAGTGGAA |
| | | GGTTCAGGATCGCTGGACTACTGGGGACAGGGTACTCTCGTGACCGTGTC |
| | | ATCGGGCGGAGGAGGTTCCGGCGGTGGCGGCTCCGGCGGCGGAGGGTCGG |
| | | AGATCGTGATGACCCAGAGCCCTGGTACTCTGAGCCTTTCGCCGGGAGAA |
| | | AGGGCCACCCTGTCCTGCCGCGCTTCCCAATCCGTGTCCTCCGCGTACTT |
| | | GGCGTGGTACCAGCAGAAGCCGGGACAGCCCCCTCGGCTGCTGATCAGCG |
| | | GGGCCAGCACCCGGGCAACCGGAATCCCAGACAGATTCGGGGGTTCCGGC |
| | | AGCGGCACAGATTTCACCCTGACTATTTCGAGGTTGGAGCCCGAGGACTT |
| | | TGCGGTGTATTACTGTCAGCACTACGGGTCGTCCTTTAATGGCTCCAGCC |
| | | TGTTCACGTTCGGACAGGGGACCCGCCTGGAAATCAAG |
| BCMA_EBB- | 379 | EVQLVESGGGLVQPGGSLRLSCAASGFTFSSYAMSWVRQAPGKGLEWVSA |
| C1978-A4-aa | | ISGSGGSTYYADSVKGRFTISRDNSKNTLYLQMNSLRAEDTAVYYCAKVE |
| VH | | GSGSLDYWGQGTLVTVSS |
| BCMA_EBB- | 400 | EIVMTQSPGTLSLSPGERATLSCRASQSVSSAYLAWYQQKPGQPPRLLIS |
| C1978-A4-aa | | GASTRATGIPDRFGGSGSGTDFTLTISRLEPEDFAVYYCQHYGSSENGSS |
| VL | | LFTFGQGTRLEIK |

BCMA_EBB-C1978-G1

| | | |
|---|---|---|
| BCMA_EBB- | 338 | EVQLVETGGGLVQPGGSLRLSCAASGITFSRYPMSWVRQAPGKGLEWVSG |
| C1978-G1-aa | | ISDSGVSTYYADSAKGRFTISRDNSKNTLFLQMSSLRDEDTAVYYCVTRA |
| ScFv domain | | GSEASDIWGQGTMVTVSSGGGGSGGGGSGGGGSEIVLTQSPATLSLSPGE |
| | | RATLSCRASQSVSNSLAWYQQKPGQAPRLLIYDASSRATGIPDRFSGSGS |
| | | GTDFTLTISRLEPEDFAIYYCQQFGTSSGLTFGGGTKLEIK |
| BCMA_EBB- | 359 | GAAGTGCAACTGGTGGAAACCGGTGGCGGCCTGGTGCAGCCTGGAGGATC |
| C1978-G1-nt | | ATTGAGGCTGTCATGCGCGGCCAGCGGTATTACCTTCTCCCGGTACCCCA |
| ScFv domain | | TGTCCTGGGTCAGACAGGCCCCGGGGAAAGGGCTTGAATGGGTGTCCGGG |
| | | ATCTCGGACTCCGGTGTCAGCACTTACTACGCCGACTCCGCCAAGGGACG |
| | | CTTCACCATTTCCCGGGACAACTCGAAGAACACCCTGTTCCTCCAAATGA |
| | | GCTCCCTCCGGGACGAGGATACTGCAGTGTACTACTGCGTGACCCGCGCC |
| | | GGGTCCGAGGCGTCTGACATTTGGGGACAGGGCACTATGGTCACCGTGTC |
| | | GTCCGGCGGAGGGGGCTCGGGAGGCGGTGGCAGCGGAGGAGGAGGGTCCG |
| | | AGATCGTGCTGACCCAATCCCCGGCCACCCTCTCGCTGAGCCCTGGAGAA |
| | | AGGGCAACCTTGTCCTGTCGCGCGAGCCAGTCCGTGAGCAACTCCCTGGC |
| | | CTGGTACCAGCAGAAGCCCGGACAGGCTCCGAGACTTCTGATCTACGACG |
| | | CTTCGAGCCGGGCCACTGGAATCCCCGACCGCTTTTCGGGGTCCGGCTCA |
| | | GGAACCGATTTCACCCTGACAATCTCACGGCTGGAGCCAGAGGATTTCGC |
| | | CATCTATTACTGCCAGCAGTTCGGTACTTCCTCCGGCCTGACTTTCGGAG |
| | | GCGGCACGAAGCTCGAAATCAAG |
| BCMA_EBB- | 380 | EVQLVETGGGLVQPGGSLRLSCAASGITFSRYPMSWVRQAPGKGLEWVSG |
| C1978-G1-aa | | ISDSGVSTYYADSAKGRFTISRDNSKNTLFLQMSSLRDEDTAVYYCVTRA |
| VH | | GSEASDIWGQGTMVTVSS |
| BCMA_EBB- | 401 | EIVLTQSPATLSLSPGERATLSCRASQSVSNSLAWYQQKPGQAPRLLIYD |
| C1978-G1-aa | | ASSRATGIPDRFSGSGSGTDFTLTISRLEPEDFAIYYCQQFGTSSGLTFG |
| VL | | GGTKLEIK |

BCMA_EBB-C1979-C1

| | | |
|---|---|---|
| BCMA_EBB- | 339 | QVQLVESGGGLVQPGGSLRLSCAASGFTFSSYAMSWVRQAPGKGLEWVSA |
| C1979-C1-aa | | ISGSGGSTYYADSVKGRFTISRDNAKNSLYLQMNSLRAEDTAIYYCARAT |
| ScFv domain | | YKRELRYYYGMDVWGQGTMVTVSSGGGGSGGGGSGGGGSEIVMTQSPGTV |
| | | SLSPGERATLSCRASQSVSSSFLAWYQQKPGQAPRLLIYGASSRATGIPD |
| | | RFSGSGSGTDFTLTISRLEPEDSAVYYCQQYHSSPSWTFGQGTRLEIK |
| BCMA_EBB- | 360 | CAAGTGCAGCTCGTGGAATCGGGTGGCGGACTGGTGCAGCCGGGGGGCTC |
| C1979-C1-nt | | ACTTAGACTGTCCTGCGCGGCCAGCGGATTCACTTTCTCCTCCTACGCCA |
| ScFv domain | | TGTCCTGGGTCAGACAGGCCCCTGGAAAGGGCCTGGAATGGGTGTCCGCA |
| | | ATCAGCGGCAGCGGCGGCTCGACCTATTACGCGGATTCAGTGAAGGGCAG |
| | | ATTCACCATTTCCCGGGACAACGCCAAGAACTCCTTGTACCTTCAAATGA |
| | | ACTCCCTCCGCGCGGAAGATACCGCAATCTACTACTGCGCTCGGGCCACT |
| | | TACAAGAGGGAACTGCGCTACTACTACGGGATGGACGTCTGGGGCCAGGG |
| | | AACCATGGTCACCGTGTCCAGCGGAGGAGGAGGATCGGGAGGAGGCGGTA |
| | | GCGGGGGTGGAGGGTCGGAGATCGTGATGACCCAGTCCCCCGGCACTGTG |
| | | TCGCTGTCCCCCGGCGAACGGGCCACCCTGTCATGTCGGGCCAGCCAGTC |
| | | AGTGTCGTCAAGCTTCCTCGCCTGGTACCAGCAGAAACCGGGACAAGCTC |
| | | CCCGCCTGCTGATCTACGGAGCCAGCAGCCGGGCCACCGGTATTCCTGAC |
| | | CGGTTCTCCGGTTCGGGGTCCGGGACCGACTTTACTCTGACTATCTCTCG |
| | | CCTCGAGCCAGAGGACTCCGCCGTGTATTACTGCCAGCAGTACCACTCCT |
| | | CCCCGTCCTGGACGTTCGGACAGGGCACAAGGCTGGAGATTAAG |
| BCMA_EBB- | 381 | QVQLVESGGGLVQPGGSLRLSCAASGFTFSSYAMSWVRQAPGKGLEWVSA |
| C1979-C1-aa | | ISGSGGSTYYADSVKGRFTISRDNAKNSLYLQMNSLRAEDTAIYYCARAT |
| VH | | YKRELRYYYGMDVWGQGTMVTVSS |
| BCMA_EBB- | 402 | EIVMTQSPGTVSLSPGERATLSCRASQSVSSSFLAWYQQKPGQAPRLLIY |
| C1979-C1-aa | | GASSRATGIPDRFSGSGSGTDFTLTISRLEPEDSAVYYCQQYHSSPSWTF |
| VL | | GQGTRLEIK |

BCMA_EBB-C1978-C7

| | | |
|---|---|---|
| BCMA_EBB- | 340 | EVQLVETGGGLVQPGGSLRLSCAASGFTFSSYAMSWVRQAPGKGLEWVSA |
| C1978-C7-aa | | ISGSGGSTYYADSVKGRFTISRDNSKNTLYLQMNTLKAEDTAVYYCARAT |
| ScFv domain | | YKRELRYYYGMDVWGQGTTVTVSSGGGGSGGGGSGGGGSEIVLTQSPSTL |
| | | SLSPGESATLSCRASQSVSTTFLAWYQQKPGQAPRLLIYGSSNRATGIPD |
| | | RFSGSGSGTDFTLTIRRLEPEDFAVYYCQQYHSSPSWTFGQGTKVEIK |
| BCMA_EBB- | 361 | GAGGTGCAGCTTGTGGAAACCGGTGGCGGACTGGTGCAGCCCGGAGGAAG |
| C1978-C7-nt | | CCTCAGGCTGTCCTGCGCCGCGTCCGGCTTCACCTTCTCCTCGTACGCCA |
| ScFv domain | | TGTCCTGGGTCCGCCAGGCCCCCGGAAAGGGCCTGGAATGGGTGTCCGCC |
| | | ATCTCTGGAAGCGGAGGTTCCACGTACTACGCGGACAGCGTCAAGGGAAG |
| | | GTTCACAATCTCCCGCGATAATTCGAAGAACACTCTGTACCTTCAAATGA |
| | | ACACCCTGAAGGCCGAGGACACTGCTGTGTACTACTGCGCACGGGCCACC |
| | | TACAAGAGAGAGCTCCGGTACTACTACGGAATGGACGTCTGGGGCCAGGG |
| | | AACTACTGTGACCGTGTCCTCGGGAGGGGGTGGCTCCGGGGGGGGCGGCT |
| | | CCGGCGGAGGCGGTTCCGAGATTGTGCTGACCCAGTCACCTTCAACTCTG |
| | | TCGCTGTCCCCGGGAGAGAGCGCTACTCTGAGCTGCCGGGCCAGCCAGTC |
| | | CGTGTCCACCACCTTCCTCGCCTGGTATCAGCAGAAGCCGGGGCAGGCAC |
| | | CACGGCTCTTGATCTACGGGTCAAGCAACAGAGCGACCGGAATTCCTGAC |
| | | CGCTTCTCGGGGAGCGGTTCAGGCACCGACTTCACCCTGACTATCCGGCG |
| | | CCTGGAACCCGAAGATTTCGCCGTGTATTACTGTCAACAGTACCACTCCT |
| | | CGCCGTCCTGGACCTTTGGCCAAGGAACCAAAGTGGAAATCAAG |
| BCMA_EBB- | 382 | EVQLVETGGGLVQPGGSLRLSCAASGFTFSSYAMSWVRQAPGKGLEWVSA |
| C1978-C7-aa | | ISGSGGSTYYADSVKGRFTISRDNSKNTLYLQMNTLKAEDTAVYYCARAT |
| VH | | YKRELRYYYGMDVWGQGTTVTVSS |
| BCMA_EBB- | 403 | EIVLTQSPSTLSLSPGESATLSCRASQSVSTTFLAWYQQKPGQAPRLLIY |
| C1978-C7-aa | | GSSNRATGIPDRFSGSGSGTDFTLTIRRLEPEDFAVYYCQQYHSSPSWTF |
| VL | | GQGTKVEIK |

BCMA_EBB-C1978-D10

| | | |
|---|---|---|
| BCMA_EBB- | 341 | EVQLVETGGGLVQPGRSLRLSCAASGFTFDDYAMHWVRQAPGKGLEWVSG |
| C1978-D10- | | ISWNSGSIGYADSVKGRFTISRDNAKNSLYLQMNSLRDEDTAVYYCARVG |
| aa | | KAVPDVWGQGTTVTVSSGGGGSGGGGSGGGGSDIVMTQTPSSLSASVGDR |
| ScFv domain | | VTITCRASQSISSYLNWYQQKPGKAPKLLIYAASSLQSGVPSRFSGSGSG |
| | | TDFTLTISSLQPEDFATYYCQQSYSTPYSFGQGTRLEIK |
| BCMA_EBB- | 362 | GAAGTGCAGCTCGTGGAAACTGGAGGTGGACTCGTGCAGCCTGGACGGTC |
| C1978-D10-nt | | GCTGCGGCTGAGCTGCGCTGCATCCGGCTTCACCTTCGACGATTATGCCA |
| ScFv domain | | TGCACTGGGTCAGACAGGCGCCAGGGAAGGGACTTGAGTGGGTGTCCGGT |
| | | ATCAGCTGGAATAGCGGCTCAATCGGATACGCGGACTCCGTGAAGGGAAG |
| | | GTTCACCATTTCCCGCGACAACGCCAAGAACTCCCTGTACTTGCAAATGA |
| | | ACAGCCTCCGGGATGAGGACACTGCCGTGTACTACTGCGCCCGCGTCGGA |
| | | AAAGCTGTGCCCGACGTCTGGGGCCAGGGAACCACTGTGACCGTGTCCAG |
| | | CGGCGGGGGTGGATCGGGCGGTGGAGGGTCCGGTGGAGGGGGCTCAGATA |
| | | TTGTGATGACCCAGACCCCCTCGTCCCTGTCCGCCTCGGTCGGCGACCGC |
| | | GTGACTATCACATGTAGAGCCTCGCAGAGCATCTCCAGCTACCTGAACTG |
| | | GTATCAGCAGAAGCCGGGGAAGGCCCCGAAGCTCCTGATCTACGCGGCAT |
| | | CATCACTGCAATCGGGAGTGCCGAGCCGGTTTTCCGGGTCCGGCTCCGGC |
| | | ACCGACTTCACGCTGACCATTTCTTCCCTGCAACCCGAGGACTTCGCCAC |
| | | TTACTACTGCCAGCAGTCCTACTCCACCCCTTACTCCTTCGGCCAAGGAA |
| | | CCAGGCTGGAAATCAAG |
| BCMA_EBB- | 383 | EVQLVETGGGLVQPGRSLRLSCAASGFTFDDYAMHWVRQAPGKGLEWVSG |
| C1978-D10-aa | | ISWNSGSIGYADSVKGRFTISRDNAKNSLYLQMNSLRDEDTAVYYCARVG |
| VH | | KAVPDVWGQGTTVTVSS |
| BCMA_EBB- | 404 | DIVMTQTPSSLSASVGDRVTITCRASQSISSYLNWYQQKPGKAPKLLIYA |
| C1978-D10-aa | | ASSLQSGVPSRFSGSGSGTDFTLTISSLQPEDFATYYCQQSYSTPYSFGQ |
| VL | | GTRLEIK |

BCMA_EBB-C1979-C12

| | | |
|---|---|---|
| BCMA_EBB- | 342 | EVQLVESGGGLVQPGRSLRLSCTASGFTFDDYAMHWVRQRPGKGLEWVAS |
| C1979-C12-aa | | INWKGNSLAYGDSVKGRFAISRDNAKNTVFLQMNSLRTEDTAVYYCASHQ |
| ScFv domain | | GVAYYNYAMDVWGRGTLVTVSSGGGGSGGGGSGGGGSEIVLTQSPGTLSL |
| | | SPGERATLSCRATQSIGSSFLAWYQQRPGQAPRLLIYGASQRATGIPDRF |
| | | SGRGSGTDFTLTISRVEPEDSAVYYCQHYESSPSWTFGQGTKVEIK |
| BCMA_EBB- | 363 | GAAGTGCAGCTCGTGGAGAGCGGGGGAGGATTGGTGCAGCCCGGAAGGTC |
| C1979-C12-nt | | CCTGCGGCTCTCCTGCACTGCGTCTGGCTTCACCTTCGACGACTACGCGA |
| ScFv domain | | TGCACTGGGTCAGACAGCGCCCGGGAAAGGGCCTGGAATGGGTCGCCTCA |
| | | ATCAACTGGAAGGGAAACTCCCTGGCCTATGGCGACAGCGTGAAGGGCCG |
| | | CTTCGCCATTTCGCGCGACAACGCCAAGAACACCGTGTTTCTGCAAATGA |
| | | ATTCCCTGCGGACCGAGGATACCGCTGTGTACTACTGCGCCAGCCACCAG |
| | | GGCGTGGCATACTATAACTACGCCATGGACGTGTGGGGAAGAGGGACGCT |
| | | CGTCACCGTGTCCTCCGGGGGCGGTGGATCGGGTGGAGGAGGAAGCGGTG |
| | | GCGGGGGCAGCGAAATCGTGCTGACTCAGAGCCCGGGAACTCTTTCACTG |
| | | TCCCCGGGAGAACGGGCCACTCTCTCGTGCCGGGCCACCCAGTCCATCGG |
| | | CTCCTCCTTCCTTGCCTGGTACCAGCAGAGGCCAGGACAGGCGCCCCGCC |
| | | TGCTGATCTACGGTGCTTCCCAACGCGCCACTGGCATTCCTGACCGGTTC |
| | | AGCGGCAGAGGGTCGGGAACCGATTTCACACTGACCATTTCCCGGGTGGA |
| | | GCCCGAAGATTCGGCAGTCTACTACTGTCAGCATTACGAGTCCTCCCCTT |
| | | CATGGACCTTCGGTCAAGGGACCAAAGTGGAGATCAAG |
| BCMA_EBB- | 384 | EVQLVESGGGLVQPGRSLRLSCTASGFTFDDYAMHWVRQRPGKGLEWVAS |
| C1979-C12-aa | | INWKGNSLAYGDSVKGRFAISRDNAKNTVFLQMNSLRTEDTAVYYCASHQ |
| VH | | GVAYYNYAMDVWGRGTLVTVSS |
| BCMA_EBB- | 405 | EIVLTQSPGTLSLSPGERATLSCRATQSIGSSFLAWYQQRPGQAPRLLIY |
| C1979-C12-aa | | GASQRATGIPDRFSGRGSGTDFTLTISRVEPEDSAVYYCQHYESSPSWTF |
| VL | | GQGTKVEIK |

BCMA_EBB-C1980-G4

| | | |
|---|---|---|
| BCMA_EBB- | 343 | EVQLVESGGGLVQPGGSLRLSCAASGFTFSSYAMSWVRQAPGKGLEWVSA |
| C1980-G4-aa | | ISGSGGSTYYADSVKGRFTISRDNSKNTLYLQMNSLRAEDTAVYYCAKVV |
| ScFv domain | | RDGMDVWGQGTTVTVSSGGGGSGGGGSGGGGSEIVLTQSPATLSLSPGER |
| | | ATLSCRASQSVSSSYLAWYQQKPGQAPRLLIYGASSRATGIPDRFFSGNGS |
| | | GTDFTLTISRLEPEDFAVYYCQQYGSPPRFTFGPGTKVDIK |
| BCMA_EBB- | 364 | GAGGTGCAGTTGGTCGAAAGCGGGGGGGGCTTGTGCAGCCTGGCGGATC |
| C1980-G4-nt | | ACTGCGGCTGTCCTGCGCGGCATCAGGCTTCACGTTTTCTTCCTACGCCA |
| ScFv domain | | TGTCCTGGGTGCGCCAGGCCCCTGGAAAGGGACTGGAATGGGTGTCCGCG |
| | | ATTTCGGGGTCCGGCGGGAGCACCTACTACGCCGATTCCGTGAAGGGCCG |
| | | CTTCACTATCTCGCGGGACAACTCCAAGAACACCCTCTACCTCCAAATGA |
| | | ATAGCCTGCGGGCCGAGGATACCGCCGTCTACTATTGCGCTAAGGTCGTG |
| | | CGCGACGGAATGGACGTGTGGGGACAGGGTACCACCGTGACAGTGTCCTC |
| | | GGGGGGAGGCGGTAGCGGCGGAGGAGGAAGCGGTGGTGGAGGTTCCGAGA |
| | | TTGTGCTGACTCAATCACCCGCGACCCTGAGCCTGTCCCCCGGCGAAAGG |
| | | GCCACTCTGTCCTGTCGGGCCAGCCAATCAGTCTCCTCCTCGTACCTGGC |
| | | CTGGTACCAGCAGAAGCCAGGACAGGCTCCGAGACTCCTTATCTATGGCG |
| | | CATCCTCCCGCGCCACCGGAATCCCGGATAGGTTCTCGGGAAACGGATCG |
| | | GGGACCGACTTCACTCTCACCATCTCCCGGCTGGAACCGGAGGACTTCGC |
| | | CGTGTACTACTGCCAGCAGTACGGCAGCCCGCCTAGATTCACTTTCGGCC |
| | | CCGGCACCAAAGTGGACATCAAG |
| BCMA_EBB- | 385 | EVQLVESGGGLVQPGGSLRLSCAASGFTFSSYAMSWVRQAPGKGLEWVSA |
| C1980-G4-aa | | ISGSGGSTYYADSVKGRFTISRDNSKNTLYLQMNSLRAEDTAVYYCAKVV |
| VH | | RDGMDVWGQGTTVTVSS |
| BCMA_EBB- | 406 | EIVLTQSPATLSLSPGERATLSCRASQSVSSSYLAWYQQKPGQAPRLLIY |
| C1980-G4-aa | | GASSRATGIPDRFSGNGSGTDFTLTISRLEPEDFAVYYCQQYGSPPRFTF |
| VL | | GPGTKVDIK |

BCMA_EBB-C1980-D2

| | | |
|---|---|---|
| BCMA_EBB- | 344 | EVQLLESGGGLVQPGGSLRLSCAASGFTFSSYAMSWVRQAPGKGLEWVSA |
| C1980-D2-aa | | ISGSGGSTYYADSVKGRFTISRDNSKNTLYLQMNSLRAEDTAVYYCAKIP |
| ScFv domain | | QTGTFDYWGQGTLVTVSSGGGGSGGGGSGGGGSEIVLTQSPGTLSLSPGE |
| | | RATLSCRASQSVSSSYLAWYQQRPGQAPRLLIYGASSRATGIPDRFSGSG |
| | | SGTDFTLTISRLEPEDFAVYYCQHYGSSPSWTFGQGTRLEIK |
| BCMA_EBB- | 365 | GAAGTGCAGCTGCTGGAGTCCGGCGGTGGATTGGTGCAACCGGGGGGATC |
| C1980-D2-nt | | GCTCAGACTGTCCTGTGCGGCGTCAGGCTTCACCTTCTCGAGCTACGCCA |
| ScFv domain | | TGTCATGGGTCAGACAGGCCCCTGGAAAGGGTCTGGAATGGGTGTCCGCC |
| | | ATTTCCGGGAGCGGGGGATCTACATACTACGCCGATAGCGTGAAGGGCCG |
| | | CTTCACCATTTCCCGGGACAACTCCAAGAACACTCTCTATCTGCAAATGA |
| | | ACTCCCTCCGCGCTGAGGACACTGCCGTGTACTACTGCGCCAAAATCCCT |
| | | CAGACCGGCACCTTCGACTACTGGGGACAGGGGACTCTGGTCACCGTCAG |
| | | CAGCGGTGGCGGAGGTTCGGGGGGAGGAGGAAGCGGCGGCGGAGGGTCCG |
| | | AGATTGTGCTGACCCAGTCACCCGGCACTTTGTCCCTGTCGCCTGGAGAA |
| | | AGGGCCACCCTTTCCTGCCGGGCATCCCAATCCGTGTCCTCCTCGTACCT |
| | | GGCCTGGTACCAGCAGAGGCCCGGACAGGCCCCACGGCTTCTGATCTACG |
| | | GAGCAAGCAGCCGCGCGACCGGTATCCCGGACCGGTTTTCGGGCTCGGGC |
| | | TCAGGAACTGACTTCACCCTCACCATCTCCCGCCTGGAACCCGAAGATTT |
| | | CGCTGTGTATTACTGCCAGCACTACGGCAGCTCCCCGTCCTGGACGTTCG |
| | | GCCAGGGAACTCGGCTGGAGATCAAG |
| BCMA_EBB- | 386 | EVQLLESGGGLVQPGGSLRLSCAASGFTFSSYAMSWVRQAPGKGLEWVSA |
| C1980-D2-aa | | ISGSGGSTYYADSVKGRFTISRDNSKNTLYLQMNSLRAEDTAVYYCAKIP |
| VH | | QTGTFDYWGQGTLVTVSS |
| BCMA_EBB- | 407 | EIVLTQSPGTLSLSPGERATLSCRASQSVSSSYLAWYQQRPGQAPRLLIY |
| C1980-D2-aa | | GASSRATGIPDRFSGSGSGTDFTLTISRLEPEDFAVYYCQHYGSSPSWTF |
| VL | | GQGTRLEIK |

BCMA_EBB-C1978-A10

| | | |
|---|---|---|
| BCMA_EBB- | 345 | EVQLVETGGGLVQPGGSLRLSCAASGFTFSSYAMSWVRQAPGKGLEWVSA |
| C1978-A10-aa | | ISGSGGSTYYADSVKGRFTMSRENDKNSVFLQMNSLRVEDTGVYYCARAN |
| ScFv domain | | YKRELRYYYGMDVWGQGTMVTVSSGGGGSGGGGSGGGGSEIVMTQSPGTL |
| | | SLSPGESATLSCRASQRVASNYLAWYQHKPGQAPSLLISGASSRATGVPD |
| | | RFSGSGSGTDFTLAISRLEPEDSAVYYCQHYDSSPSWTFGQGTKVEIK |
| BCMA_EBB- | 366 | GAAGTGCAACTGGTGGAAACCGGTGGAGGACTCGTGCAGCCTGGCGGCAG |
| C1978-A10-nt | | CCTCCGGCTGAGCTGCGCCGCTTCGGGATTCACCTTTTCCTCCTACGCGA |
| ScFv domain | | TGTCTTGGGTCAGACAGGCCCCCGGAAAGGGGCTGGAATGGGTGTCAGCC |
| | | ATCTCCGGCTCCGGCGGATCAACGTACTACGCCGACTCCGTGAAAGGCCG |
| | | GTTCACCATGTCGCGCGAGAATGACAAGAACTCCGTGTTCCTGCAAATGA |
| | | ACTCCCTGAGGGTGGAGGACACCGGAGTGTACTATTGTGCGCGCGCCAAC |
| | | TACAAGAGAGAGCTGCGGTACTACTACGGAATGGACGTCTGGGGACAGGG |
| | | AACTATGGTGACCGTGTCATCCGGTGGAGGGGGAAGCGGCGGTGGAGGCA |
| | | GCGGGGGCGGGGGTTCAGAAATTGTCATGACCCAGTCCCCGGGAACTCTT |
| | | TCCCTCTCCCCCGGGGAATCCGCGACTTTGTCCTGCCGGGCCAGCCAGCG |
| | | CGTGGCCTCGAACTACCTCGCATGGTACCAGCATAAGCCAGGCCAAGCCC |
| | | CTTCCCTGCTGATTTCCGGGGCTAGCAGCCGCGCCACTGGCGTGCCGGAT |
| | | AGGTTCTCGGGAAGCGGCTCGGGTACCGATTTCACCCTGGCAATCTCGCG |
| | | GCTGGAACCGGAGGATTCGGCCGTGTACTACTGCCAGCACTATGACTCAT |
| | | CCCCCTCCTGGACATTCGGACAGGGCACCAAGGTCGAGATCAAG |
| BCMA_EBB- | 387 | EVQLVETGGGLVQPGGSLRLSCAASGFTFSSYAMSWVRQAPGKGLEWVSA |
| C1978-A10-aa | | ISGSGGSTYYADSVKGRFTMSRENDKNSVFLQMNSLRVEDTGVYYCARAN |
| VH | | YKRELRYYYGMDVWGQGTMVTVSS |
| BCMA_EBB- | 408 | EIVMTQSPGTLSLSPGESATLSCRASQRVASNYLAWYQHKPGQAPSLLIS |
| C1978-A10-aa | | GASSRATGVPDRFSGSGSGTDFTLAISRLEPEDSAVYYCQHYDSSPSWTF |
| VL | | GQGTKVEIK |

BCMA_EBB-C1978-D4

| | | |
|---|---|---|
| BCMA_EBB- | 346 | EVQLLETGGGLVQPGGSLRLSCAASGFSFSSYAMSWVRQAPGKGLEWVSA |
| C1978-D4-aa | | ISGSGGSTYYADSVKGRFTISRDNSKNTLYLQMNSLRAEDTAVYYCAKAL |
| ScFv domain | | VGATGAFDIWGQGTLVTVSSGGGGSGGGGSGGGGSEIVLTQSPGTLSLSP |
| | | GERATLSCRASQSLSSNFLAWYQQKPGQAPGLLIYGASNWATGTPDRFSG |
| | | SGSGTDFTLTITRLEPEDFAVYYCQYYGTSPMYTFGQGTKVEIK |
| BCMA_EBB- | 367 | GAAGTGCAGCTGCTCGAAACCGGTGGAGGGCTGGTGCAGCCAGGGGGCTC |
| C1978-D4-nt | | CCTGAGGCTTTCATGCGCCGCTAGCGGATTCTCCTTCTCCTCTTACGCCA |
| ScFv domain | | TGTCGTGGGTCCGCCAAGCCCCTGGAAAAGGCCTGGAATGGGTGTCCGCG |
| | | ATTTCCGGGAGCGGAGGTTCGACCTATTACGCCGACTCCGTGAAGGGCCG |
| | | CTTTACCATCTCCCGGGATAACTCCAAGAACACTCTGTACCTCCAAATGA |
| | | ACTCGCTGAGAGCCGAGGACACCGCCGTGTATTACTGCGCGAAGGCGCTG |
| | | GTCGGCGCGACTGGGGCATTCGACATCTGGGGACAGGGAACTCTTGTGAC |
| | | CGTGTCGAGCGGAGGCGGCGGCTCCGGCGGAGGAGGGAGCGGGGGCGGTG |
| | | GTTCCGAAATCGTGTTGACTCAGTCCCCGGGAACCCTGAGCTTGTCACCC |
| | | GGGGAGCGGGCCACTCTCTCCTGTCGCGCCTCCCAATCGCTCTCATCCAA |
| | | TTTCCTGGCCTGGTACCAGCAGAAGCCCGGACAGGCCCCGGGCCTGCTCA |
| | | TCTACGGCGCTTCAAACTGGGCAACGGGAACCCCTGATCGGTTCAGCGGA |
| | | AGCGGATCGGGTACTGACTTTACCCTGACCATCACCAGACTGGAACCGGA |
| | | GGACTTCGCCGTGTACTACTGCCAGTACTACGGCACCTCCCCCATGTACA |
| | | CATTCGGACAGGGTACCAAGGTCGAGATTAAG |
| BCMA_EBB- | 388 | EVQLLETGGGLVQPGGSLRLSCAASGFSFSSYAMSWVRQAPGKGLEWVSA |
| C1978-D4-aa | | ISGSGGSTYYADSVKGRFTISRDNSKNTLYLQMNSLRAEDTAVYYCAKAL |
| VH | | VGATGAFDIWGQGTLVTVSS |
| BCMA_EBB- | 409 | EIVLTQSPGTLSLSPGERATLSCRASQSLSSNFLAWYQQKPGQAPGLLIY |
| C1978-D4-aa | | GASNWATGTPDRFSGSGSGTDFTLTITRLEPEDFAVYYCQYYGTSPMYTF |
| VL | | GQGTKVEIK |

BCMA_EBB-C1980-A2

| | | |
|---|---|---|
| BCMA_EBB- | 347 | EVQLLESGGGLVQPGGSLRLSCAASGFTFSSYAMSWVRQAPGKGLEWVSA |
| C1980-A2-aa | | ISGSGGSTYYADSVKGRFTISRDNSKNTLYLQMNSLRAEDTAVYYCVLWF |
| ScFv domain | | GEGFDPWGQGTLVTVSSGGGGSGGGGSGGGGSDIVLTQSPLSLPVTPGEP |
| | | ASISCRSSQSLLHSNGYNYLDWYLQKPGQSPQLLIYLGSNRASGVPDRFS |
| | | GSGSGTDFTLKISRVEAEDVGVYYCMQALQTPLTFGGGTKVDIK |
| BCMA_EBB- | 368 | GAAGTGCAGCTGCTTGAGAGCGGTGGAGGTCTGGTGCAGCCCGGGGGATC |
| C1980-A2-nt | | ACTGCGCCTGTCCTGTGCCGCGTCCGGTTTCACTTTCTCCTCGTACGCCA |
| ScFv domain | | TGTCGTGGGTCAGACAGGCACCGGGAAAGGGACTGGAATGGGTGTCAGCC |
| | | ATTTCGGGTTCGGGGGGCAGCACCTACTACGCTGACTCCGTGAAGGGCCG |
| | | GTTCACCATTTCCCGCGACAACTCCAAGAACACCTTGTACCTCCAAATGA |
| | | ACTCCCTGCGGGCCGAAGATACCGCCGTGTATTACTGCGTGCTGTGGTTC |
| | | GGAGAGGGATTCGACCCGTGGGGACAAGGAACACTCGTGACTGTGTCATC |
| | | CGGCGGAGGCGGCAGCGGTGGCGGCGGTTCCGGCGGCGGCGGATCTGACA |
| | | TCGTGTTGACCCAGTCCCCTCTGAGCCTGCCGGTCACTCCTGGCGAACCA |
| | | GCCAGCATCTCCTGCCGGTCGAGCCAGTCCCTCCTGCACTCCAATGGGTA |
| | | CAACTACCTCGATTGGTATCTGCAAAAGCCGGGCCAGAGCCCCCAGCTGC |
| | | TGATCTACCTTGGGTCAAACCGCGCTTCCGGGGTGCCTGATAGATTCTCC |
| | | GGGTCCGGGAGCGGAACCGACTTTACCCTGAAAATCTCGAGGGTGGAGGC |
| | | CGAGGACGTCGGAGTGTACTACTGCATGCAGGCGCTCCAGACTCCCCTGA |
| | | CCTTCGGAGGAGGAACGAAGGTCGACATCAAGA |
| BCMA_EBB- | 389 | EVQLLESGGGLVQPGGSLRLSCAASGFTFSSYAMSWVRQAPGKGLEWVSA |
| C1980-A2-aa | | ISGSGGSTYYADSVKGRFTISRDNSKNTLYLQMNSLRAEDTAVYYCVLWF |
| VH | | GEGFDPWGQGTLVTVSS |
| BCMA_EBB- | 410 | DIVLTQSPLSLPVTPGEPASISCRSSQSLLHSNGYNYLDWYLQKPGQSPQ |
| C1980-A2-aa | | LLIYLGSNRASGVPDRFSGSGSGTDFTLKISRVEAEDVGVYYCMQALQTP |
| VL | | LTFGGGTKVDIK |

BCMA_EBB-C1981-C3

| | | |
|---|---|---|
| BCMA_EBB- | 348 | QVQLVESGGGLVQPGGSLRLSCAASGFTFSSYAMSWVRQAPGKGLEWVSA |
| C1981-C3-aa | | ISGSGGSTYYADSVKGRFTISRDNSKNTLYLQMNSLRAEDTAVYYCAKVG |
| ScFv domain | | YDSSGYYRDYYGMDVWGQGTTVTVSSGGGGSGGGGSGGGGSEIVLTQSPG |
| | | TLSLSPGERATLSCRASQSVSSSYLAWYQQKPGQAPRLLIYGTSSRATGI |
| | | SDRFSGSGSGTDFTLTISRLEPEDFAVYYCQHYGNSPPKFTFGPGTKLEI |
| | | K |
| BCMA_EBB- | 369 | CAAGTGCAGCTCGTGGAGTCAGGCGGAGGACTGGTGCAGCCCGGGGGCTC |
| C1981-C3-nt | | CCTGAGACTTTCCTGCGCGGCATCGGGTTTTACCTTCTCCTCCTATGCTA |
| ScFv domain | | TGTCCTGGGTGCGCCAGGCCCCGGGAAAGGGACTGGAATGGGTGTCCGCA |
| | | ATCAGCGGTAGCGGGGGCTCAACATACTACGCCGACTCCGTCAAGGGTCG |
| | | CTTCACTATTTCCCGGGACAACTCCAAGAATACCCTGTACCTCCAAATGA |
| | | ACAGCCTCAGGGCCGAGGATACTGCCGTGTACTACTGCGCCAAAGTCGGA |
| | | TACGATAGCTCCGGTTACTACCGGGACTACTACGGAATGGACGTGTGGGG |
| | | ACAGGGCACCACCGTGACCGTGTCAAGCGGCGGAGGCGGTTCAGGAGGGG |
| | | GAGGCTCCGGCGGTGGAGGGTCCGAAATCGTCCTGACTCAGTCGCCTGGC |
| | | ACTCTGTCGTTGTCCCCGGGGGAGCGCGCTACCCTGTCGTGTCGGGCGTC |
| | | GCAGTCCGTGTCGAGCTCCTACCTCGCGTGGTACCAGCAGAAGCCCGGAC |
| | | AGGCCCCTAGACTTCTGATCTACGGCACTTCTTCACGCGCCACCGGGATC |
| | | AGCGACAGGTTCAGCGGCTCCGGCTCCGGGACCGACTTCACCCTGACCAT |
| | | TAGCCGGCTGGAGCCTGAAGATTTCGCCGTGTATTACTGCCAACACTACG |
| | | GAAACTCGCCGCCAAAGTTCACGTTCGGACCCGGAACCAAGCTGGAAATC |
| | | AAG |
| BCMA_EBB- | 390 | QVQLVESGGGLVQPGGSLRLSCAASGFTFSSYAMSWVRQAPGKGLEWVSA |
| C1981-C3-aa | | ISGSGGSTYYADSVKGRFTISRDNSKNTLYLQMNSLRAEDTAVYYCAKVG |
| VH | | YDSSGYYRDYYGMDVWGQGTTVTVSS |
| BCMA_EBB- | 411 | EIVLTQSPGTLSLSPGERATLSCRASQSVSSSYLAWYQQKPGQAPRLLIY |
| C1981-C3-aa | | GTSSRATGISDRFSGSGSGTDFTLTISRLEPEDFAVYYCQHYGNSPPKFT |
| VL | | FGPGTKLEIK |

BCMA_EBB-C1978-G4

| | | |
|---|---|---|
| BCMA_EBB- | 349 | EVQLVESGGGLVQPGGSLRLSCAASGFTFSSYAMSWVRQAPGKGLEWVSA |
| C1978-G4-aa | | ISGSGGSTYYADSVKGRFTISRDNSKNTLYLQMNSLRAEDTAVYYCAKMG |
| ScFv domain | | WSSGYLGAFDIWGQGTTVTVSSGGGGSGGGGSGGGGSEIVLTQSPGTLSL |
| | | SPGERATLSCRASQSVASSFLAWYQQKPGQAPRLLIYGASGRATGIPDRF |
| | | SGSGSGTDFTLTISRLEPEDFAVYYCQHYGGSPRLTFGGGTKVDIK |
| BCMA_EBB- | 370 | GAAGTCCAACTGGTGGAGTCCGGGGGAGGGCTCGTGCAGCCCGGAGGCAG |
| C1978-G4-nt | | CCTTCGGCTGTCGTGCGCCGCCTCCGGGTTCACGTTCTCATCCTACGCGA |
| ScFv domain | | TGTCGTGGGTCAGACAGGCACCAGGAAAGGGACTGGAATGGGTGTCCGCC |
| | | ATTAGCGGCTCCGGCGGTAGCACCTACTATGCCGACTCAGTGAAGGGAAG |
| | | GTTCACTATCTCCCGCGACAACAGCAAGAACACCCTGTACCTCCAAATGA |
| | | ACTCTCTGCGGGCCGAGGATACCGCGGTGTACTATTGCGCCAAGATGGGT |
| | | TGGTCCAGCGGATACTTGGGAGCCTTCGACATTTGGGGACAGGGCACTAC |
| | | TGTGACCGTGTCCTCCGGGGGTGGCGGATCGGGAGGCGGCGGCTCGGGTG |
| | | GAGGGGGTTCCGAAATCGTGTTGACCCAGTCACCGGGAACCCTCTCGCTG |
| | | TCCCCGGGAGAACGGGCTACACTGTCATGTAGAGCGTCCCAGTCCGTGGC |
| | | TTCCTCGTTCCTGGCCTGGTACCAGCAGAAGCCGGGACAGGCACCCCGCC |
| | | TGCTCATCTACGGAGCCAGCGGCCGGGCGACCGGCATCCCTGACCGCTTC |
| | | TCCGGTTCCGGCTCGGGCACCGACTTTACTCTGACCATTAGCAGGCTTGA |
| | | GCCCGAGGATTTTGCCGTGTACTACTGCCAACACTACGGGGGGAGCCCTC |
| | | GCCTGACCTTCGGAGGCGGAACTAAGGTCGATATCAAAA |
| BCMA_EBB- | 391 | EVQLVESGGGLVQPGGSLRLSCAASGFTFSSYAMSWVRQAPGKGLEWVSA |
| C1978-G4-aa | | ISGSGGSTYYADSVKGRFTISRDNSKNTLYLQMNSLRAEDTAVYYCAKMG |
| VH | | WSSGYLGAFDIWGQGTTVTVSS |
| BCMA_EBB- | 412 | EIVLTQSPGTLSLSPGERATLSCRASQSVASSFLAWYQQKPGQAPRLLIY |
| C1978-G4-aa | | GASGRATGIPDRFSGSGSGTDFTLTISRLEPEDFAVYYCQHYGGSPRLTF |
| VL | | GGGTKVDIK |

[0521] In embodiments, additional exemplary BCMA CAR constructs are generated using the CDR and/or VH and VL sequences from PCT Publication WO2012/0163805 (the contents of which are hereby incorporated by reference in its entirety). In embodiments, additional exemplary BCMA CAR constructs are generated using the CDR and/or VH and VL sequences from PCT Publication WO2016/014565 (the contents of which are hereby incorporated by reference in its entirety). In embodiments, additional exemplary BCMA CAR constructs are generated using the CDR and/or VH and VL sequences from PCT Publication WO2014/122144 (the contents of which are hereby incorporated by reference in its entirety). In embodiments, additional exemplary BCMA CAR constructs are generated using the CAR molecules, and/or the VH and VL sequences from PCT Publication WO2016/014789 (the contents of which are hereby incorporated by reference in its entirety). In embodiments, additional exemplary BCMA CAR constructs are generated using the CAR molecules, and/or the VH and VL sequences from PCT Publication WO2014/089335 (the contents of which are hereby incorporated by reference in its entirety). In embodiments, additional exemplary BCMA CAR constructs are generated using the CAR molecules, and/or the VH and VL sequences from PCT Publication WO2014/140248 (the contents of which are hereby incorporated by reference in its entirety).

[0522] In embodiments, additional exemplary BCMA CAR constructs can also be generated using the VH and VL sequences found in Table 9. The amino acid sequences of exemplary scFv domains comprising the VH and VL domains and a linker sequence, and full-length CARs, are in Table 9.

TABLE 9
Additional exemplary BCMA binding domain sequences

| | | SEQ ID |
|---|---|---|
| Name | Sequence | NO: |
| A7D12.2 | QIQLVQSGPDLKKPGETVKLSCKASGYTFTNFGMNWVKQAPGKGFKWMAWINTY | 455 |
| VH | TGESYFADDFKGRFAFSVETSATTAYLQINNLKTEDTATYFCARGEIYYGYDGG | |
| | FAYWGQGTLVTVSA | |
| A7D12.2 | DVVMTQSHRFMSTSVGDRVSITCRASQDVNTAVSWYQQKPGQSPKLLIFSASYR | 459 |
| VL | YTGVPDRFTGSGSGADFTLTISSVQAEDLAVYYCQQHYSTPWTFGGGTKLDIK | |
| A7D12.2 | QIQLVQSGPDLKKPGETVKLSCKASGYTFTNFGMNWVKQAPGKGFKWMAWINTY | 463 |
| ScFv | TGESYFADDFKGRFAFSVETSATTAYLQINNLKTEDTATYFCARGEIYYGYDGG | |
| domain | FAYWGQGTLVTVSAGGGGSGGGGSGGGGSDVVMTQSHRFMSTSVGDRVSITCRA | |
| | SQDVNTAVSWYQQKPGQSPKLLIFSASYRYTGVPDRFTGSGSGADFTLTISSVQ | |
| | AEDLAVYYCQQHYSTPWTFGGGTKLDIK | |
| C11D5.3 | QIQLVQSGPELKKPGETVKISCKASGYTFTDYSINWVKRAPGKGLKWMGWINTE | 456 |
| VH | TREPAYAYDFRGRFAFSLETSASTAYLQINNLKYEDTATYFCALDYSYAMDYWG | |
| | QGTSVTVSS | |
| C11D5.3 | DIVLTQSPASLAMSLGKRATISCRASESVSVIGAHLIHWYQQKPGQPPKLLIYL | 460 |
| VL | ASNLETGVPARFSGSGSGTDFTLTIDPVEEDDVAIYSCLQSRIFPRTFGGGTKL | |
| | EIK | |
| C11D5.3 | QIQLVQSGPELKKPGETVKISCKASGYTFTDYSINWVKRAPGKGLKWMGWINTE | 464 |
| ScFv | TREPAYAYDFRGRFAFSLETSASTAYLQINNLKYEDTATYFCALDYSYAMDYWG | |
| domain | QGTSVTVSSGGGGSGGGGSGGGGSQIQLVQSGPELKKPGETVKISCKASGYTFT | |
| | DYSINWVKRAPGKGLKWMGWINTETREPAYAYDFRGRFAFSLETSASTAYLQIN | |
| | NLKYEDTATYFCALDYSYAMDYWGQGTSVTVSS | |
| C12A3.2 | QIQLVQSGPELKKPGETVKISCKASGYTFRHYSMNWVKQAPGKGLKWMGRINTE | 457 |
| VH | SGVPIYADDFKGRFAFSVETSASTAYLVINNLKDEDTASYFCSNDYLYSLDFWG | |
| | QGTALTVSS | |
| C12A3.2 | DIVLTQSPPSLAMSLGKRATISCRASESVTILGSHLIYWYQQKPGQPPTLLIQL | 461 |
| VL | ASNVQTGVPARFSGSGSRTDFTLTIDPVEEDDVAVYYCLQSRTIPRTFGGGTKL | |
| | EIK | |
| C12A3.2 | QIQLVQSGPELKKPGETVKISCKASGYTFRHYSMNWVKQAPGKGLKWMGRINTE | 465 |
| ScFv | SGVPIYADDFKGRFAFSVETSASTAYLVINNLKDEDTASYFCSNDYLYSLDFWG | |
| domain | QGTALTVSSGGGGSGGGGSGGGGSDIVLTQSPPSLAMSLGKRATISCRASESVT | |
| | ILGSHLIYWYQQKPGQPPTLLIQLASNVQTGVPARFSGSGSRTDFTLTIDPVEE | |
| | DDVAVYYCLQSRTIPRTFGGGTKLEIK | |
| C13F12.1 | QIQLVQSGPELKKPGETVKISCKASGYTFTHYSMNWVKQAPGKGLKWMGRINTE | 458 |
| VH | TGEPLYADDFKGRFAFSLETSASTAYLVINNLKNEDTATFFCSNDYLYSCDYWG | |
| | QGTTLTVSS | |
| C13F12.1 | DIVLTQSPPSLAMSLGKRATISCRASESVTILGSHLIYWYQQKPGQPPTLLIQL | 462 |
| VL | ASNVQTGVPARFSGSGSRTDFTLTIDPVEEDDVAVYYCLQSRTIPRTFGGGTKL | |
| | EIK | |
| C13F12.1 | QIQLVQSGPELKKPGETVKISCKASGYTFTHYSMNWVKQAPGKGLKWMGRINTE | 466 |
| ScFv | TGEPLYADDFKGRFAFSLETSASTAYLVINNLKNEDTATFFCSNDYLYSCDYWG | |
| domain | QGTTLTVSSGGGGSGGGGSGGGGSDIVLTQSPPSLAMSLGKRATISCRASESVT | |
| | ILGSHLIYWYQQKPGQPPTLLIQLASNVQTGVPARFSGSGSRTDFTLTIDPVEE | |
| | DDVAVYYCLQSRTIPRTFGGGTKLEIK | |

[0523] The sequences of human CDR sequences of the scFv domains are shown in Table 10 for the heavy chain variable domains and in Table 11 for the light chain variable domains. “ID” stands for the respective SEQ ID NO for each CDR. The CDRs are shown according to the Kabat definition, however, the CDRs under other convention, for example, Chothia or the combined Kabat/Chothia definitions may be readily deduced based on the VH and VL sequences above.

TABLE 10
Heavy Chain Variable Domain CDRs from the sequences above according to the
Kabat numbering scheme (Kabat et al. (1991), “Sequences of Proteins of Immunological
Interest,” 5th Ed. Public Health Service, National Institutes of Health, Bethesda, MD)

| Candidate | HCDR1 | ID | HCDR2 | ID | HCDR3 | ID |
|---|---|---|---|---|---|---|
| 139109 | NHGMS | 594 | GIVYSGSTYYAAS | 634 | HGGESDV | 674 |
| | | | VKG | | | |
| 139103 | NYAMS | 584 | GISRSGENTYYAD | 624 | SPAHYYGGMDV | 664 |
| | | | SVKG | | | |
| 139105 | DYAMH | 585 | GISWNSGSIGYAD | 625 | HSFLAY | 665 |
| | | | SVKG | | | |
| 139111 | NHGMS | 586 | GIVYSGSTYYAAS | 626 | HGGESDV | 666 |
| | | | VKG | | | |
| 139100 | NFGIN | 587 | WINPKNNNTNYA | 627 | GPYYYQSYMDV | 667 |
| | | | QKFQG | | | |
| 139101 | SDAMT | 588 | VISGSGGTTYYA | 628 | LDSSGYYYARGPR | 668 |
| | | | DSVKG | | Y | |
| 139102 | NYGIT | 589 | WISAYNGNTNYA | 629 | GPYYYYMDV | 669 |
| | | | QKFQG | | | |
| 139104 | NHGMS | 590 | GIVYSGSTYYAAS | 630 | HGGESDV | 670 |
| | | | VKG | | | |
| 139106 | NHGMS | 591 | GIVYSGSTYYAAS | 631 | HGGESDV | 671 |
| | | | VKG | | | |
| 139107 | NHGMS | 592 | GIVYSGSTYYAAS | 632 | HGGESDV | 672 |
| | | | VKG | | | |
| 139108 | DYYMS | 593 | YISSSGSTIYYADS | 633 | ESGDGMDV | 673 |
| | | | VKG | | | |
| 139110 | DYYMS | 595 | YISSSGNTIYYAD | 635 | STMVREDY | 675 |
| | | | SVKG | | | |
| 139112 | NHGMS | 596 | GIVYSGSTYYAAS | 636 | HGGESDV | 676 |
| | | | VKG | | | |
| 139113 | NHGMS | 597 | GIVYSGSTYYAAS | 637 | HGGESDV | 677 |
| | | | VKG | | | |
| 139114 | NHGMS | 598 | GIVYSGSTYYAAS | 638 | HGGESDV | 678 |
| | | | VKG | | | |
| 149362 | SSYYYW | 599 | SIYYSGSAYYNPS | 639 | HWQEWPDAFDI | 679 |
| | G | | LKS | | | |
| 149363 | TSGMCV | 600 | RIDWDEDKFYST | 640 | SGAGGTSATAFDI | 680 |
| | S | | SLKT | | | |
| 149364 | SYSMN | 601 | SISSSSSYIYYADS | 641 | TIAAVYAFDI | 681 |
| | | | VKG | | | |
| 149365 | DYYMS | 602 | YISSSGSTIYYADS | 642 | DLRGAFDI | 682 |
| | | | VKG | | | |
| 149366 | SHYIH | 603 | MINPSGGVTAYS | 643 | EGSGSGWYFDF | 683 |
| | | | QTLQG | | | |
| 149367 | SGGYY | 604 | YIYYSGSTYYNPS | 644 | AGIAARLRGAFDI | 684 |
| | WS | | LKS | | | |
| 149368 | SYAIS | 605 | GIIPIFGTANYAQ | 645 | RGGYQLLRWDVG | 685 |
| | | | KFQG | | LLRSAFDI | |
| 149369 | SNSAAW | 606 | RTYYRSKWYSFY | 646 | SSPEGLFLYWFDP | 686 |
| | N | | AISLKS | | | |
| BCMA_ | SYAMS | 607 | AISGSGGSTYYAD | 647 | VEGSGSLDY | 687 |
| EBB-C1978- | | | SVKG | | | |
| A4 | | | | | | |
| BCMA_ | RYPMS | 608 | GISDSGVSTYYAD | 648 | RAGSEASDI | 688 |
| EBB-C1978- | | | SAKG | | | |
| G1 | | | | | | |
| BCMA_ | SYAMS | 609 | AISGSGGSTYYAD | 649 | ATYKRELRYYYG | 689 |
| EBB-C1979- | | | SVKG | | MDV | |
| C1 | | | | | | |
| BCMA_ | SYAMS | 610 | AISGSGGSTYYAD | 650 | ATYKRELRYYYG | 690 |
| EBB-C1978- | | | SVKG | | MDV | |
| C7 | | | | | | |
| BCMA_ | DYAMH | 611 | GISWNSGSIGYAD | 651 | VGKAVPDV | 691 |
| EBB-C1978- | | | SVKG | | | |
| D10 | | | | | | |
| BCMA_ | DYAMH | 612 | SINWKGNSLAYG | 652 | HQGVAYYNYAMD | 692 |
| EBB-C1979- | | | DSVKG | | V | |
| C12 | | | | | | |
| BCMA_ | SYAMS | 613 | AISGSGGSTYYAD | 653 | VVRDGMDV | 693 |
| EBB-C1980- | | | SVKG | | | |
| G4 | | | | | | |
| BCMA_ | SYAMS | 614 | AISGSGGSTYYAD | 654 | IPQTGTEDY | 694 |
| EBB-C1980- | | | SVKG | | | |
| D2 | | | | | | |
| BCMA_ | SYAMS | 615 | AISGSGGSTYYAD | 655 | ANYKRELRYYYG | 695 |
| EBB-C1978- | | | SVKG | | MDV | |
| A10 | | | | | | |
| BCMA_ | SYAMS | 616 | AISGSGGSTYYAD | 656 | ALVGATGAFDI | 696 |
| EBB-C1978- | | | SVKG | | | |
| D4 | | | | | | |
| BCMA_ | SYAMS | 617 | AISGSGGSTYYAD | 657 | WFGEGFDP | 697 |
| EBB-C1980- | | | SVKG | | | |
| A2 | | | | | | |
| BCMA_ | SYAMS | 618 | AISGSGGSTYYAD | 658 | VGYDSSGYYRDY | 698 |
| EBB-C1981- | | | SVKG | | YGMDV | |
| C3 | | | | | | |
| BCMA_ | SYAMS | 619 | AISGSGGSTYYAD | 659 | MGWSSGYLGAFDI | 699 |
| EBB-C1978- | | | SVKG | | | |
| G4 | | | | | | |
| A7D12.2 | NFGMN | 620 | WINTYTGESYFA | 660 | GEIYYGYDGGFAY | 700 |
| | | | DDFKG | | | |
| C11D5.3 | DYSIN | 621 | WINTETREPAYA | 661 | DYSYAMDY | 701 |
| | | | YDFRG | | | |
| C12A3.2 | HYSMN | 622 | RINTESGVPIYAD | 662 | DYLYSLDF | 702 |
| | | | DFKG | | | |
| C13F12.1 | HYSMN | 623 | RINTETGEPLYAD | 663 | DYLYSCDY | 703 |
| | | | DFKG | | | |

TABLE 11
Light Chain Variable Domain CDRs from the sequences above according to the
Kabat numbering scheme (Kabat et al. (1991), “Sequences of Proteins of Immunological
Interest,” 5th Ed. Public Health Service, National Institutes of Health, Bethesda, MD)

| Candidate | LCDR1 | ID | LCDR2 | ID | LCDR3 | ID |
|---|---|---|---|---|---|---|
| 139109 | RASQSISSYLN | 714 | AASSLQS | 754 | QQSYSTPYT | 794 |
| 139103 | RASQSISSSFLA | 704 | GASRRAT | 744 | QQYHSSPSWT | 784 |
| 139105 | RSSQSLLHSNGYNY | 705 | LGSNRAS | 745 | MQALQTPYT | 785 |
| | LD | | | | | |
| 139111 | KSSQSLLRNDGKTP | 706 | EVSNRFS | 746 | MQNIQFPS | 786 |
| | LY | | | | | |
| 139100 | RSSQSLLHSNGYNY | 707 | LGSKRAS | 747 | MQALQTPYT | 787 |
| | LN | | | | | |
| 139101 | RASQSISSYLN | 708 | GASTLAS | 748 | QQSYKRAS | 788 |
| 139102 | RSSQSLLYSNGYNY | 709 | LGSNRAS | 749 | MQGRQFPYS | 789 |
| | VD | | | | | |
| 139104 | RASQSVSSNLA | 710 | GASTRAS | 750 | QQYGSSLT | 790 |
| 139106 | RASQSVSSKLA | 711 | GASIRAT | 751 | QQYGSSSWT | 791 |
| 139107 | RASQSVGSTNLA | 712 | DASNRAT | 752 | QQYGSSPPWT | 792 |
| 139108 | RASQSISSYLN | 713 | AASSLQS | 753 | QQSYTLA | 793 |
| 139110 | KSSESLVHNSGKTY | 715 | EVSNRDS | 755 | MQGTHWPGT | 795 |
| | LN | | | | | |
| 139112 | QASEDINKFLN | 716 | DASTLQT | 756 | QQYESLPLT | 796 |
| 139113 | RASQSVGSNLA | 717 | GASTRAT | 757 | QQYNDWLPVT | 797 |
| 139114 | RASQSIGSSSLA | 718 | GASSRAS | 758 | QQYAGSPPFT | 798 |
| 149362 | KASQDIDDAMN | 719 | SATSPVP | 759 | LQHDNFPLT | 799 |
| 149363 | RASQDIYNNLA | 720 | AANKSQS | 760 | QHYYRFPYS | 800 |
| 149364 | RSSQSLLHSNGYNY | 721 | LGSNRAS | 761 | MQALQTPYT | 801 |
| | LD | | | | | |
| 149365 | GGNNIGTKSVH | 722 | DDSVRPS | 762 | QVWDSDSEHV | 802 |
| | | | | | V | |
| 149366 | SGDGLSKKYVS | 723 | RDKERPS | 763 | QAWDDTTVV | 803 |
| 149367 | RASQGIRNWLA | 724 | AASNLQS | 764 | QKYNSAPFT | 804 |
| 149368 | GGNNIGSKSVH | 725 | GKNNRPS | 765 | SSRDSSGDHLR | 805 |
| | | | | | V | |
| 149369 | QGDSLGNYYAT | 726 | GTNNRPS | 766 | NSRDSSGHHLL | 806 |
| BCMA_ | RASQSVSSAYLA | 727 | GASTRAT | 767 | QHYGSSFNGSS | 807 |
| EBB- | | | | | LFT | |
| C1978-A4 | | | | | | |
| BCMA_ | RASQSVSNSLA | 728 | DASSRAT | 768 | QQFGTSSGLT | 808 |
| EBB- | | | | | | |
| C1978-G1 | | | | | | |
| BCMA_ | RASQSVSSSFLA | 729 | GASSRAT | 769 | QQYHSSPSWT | 809 |
| EBB- | | | | | | |
| C1979-C1 | | | | | | |
| BCMA_ | RASQSVSTTFLA | 730 | GSSNRAT | 770 | QQYHSSPSWT | 810 |
| EBB- | | | | | | |
| C1978-C7 | | | | | | |
| BCMA_ | RASQSISSYLN | 731 | AASSLQS | 771 | QQSYSTPYS | 811 |
| EBB- | | | | | | |
| C1978-D10 | | | | | | |
| BCMA_ | RATQSIGSSFLA | 732 | GASQRAT | 772 | QHYESSPSWT | 812 |
| EBB- | | | | | | |
| C1979-C12 | | | | | | |
| BCMA_ | RASQSVSSSYLA | 733 | GASSRAT | 773 | QQYGSPPRFT | 813 |
| EBB- | | | | | | |
| C1980-G4 | | | | | | |
| BCMA_ | RASQSVSSSYLA | 734 | GASSRAT | 774 | QHYGSSPSWT | 814 |
| EBB- | | | | | | |
| C1980-D2 | | | | | | |
| BCMA_ | RASQRVASNYLA | 735 | GASSRAT | 775 | QHYDSSPSWT | 815 |
| EBB- | | | | | | |
| C1978-A10 | | | | | | |
| BCMA_ | RASQSLSSNFLA | 736 | GASNWA | 776 | QYYGTSPMYT | 816 |
| EBB- | | | T | | | |
| C1978-D4 | | | | | | |
| BCMA_ | RSSQSLLHSNGYNY | 737 | LGSNRAS | 777 | MQALQTPLT | 817 |
| EBB- | LD | | | | | |
| C1980-A2 | | | | | | |
| BCMA_ | RASQSVSSSYLA | 738 | GTSSRAT | 778 | QHYGNSPPKFT | 818 |
| EBB- | | | | | | |
| C1981-C3 | | | | | | |
| BCMA_ | RASQSVASSFLA | 739 | GASGRAT | 779 | QHYGGSPRLT | 819 |
| EBB- | | | | | | |
| C1978-G4 | | | | | | |
| A7D12.2 | RASQDVNTAVS | 740 | SASYRYT | 780 | QQHYSTPWT | 820 |
| C11D5.3 | RASESVSVIGAHLI | 741 | LASNLET | 781 | LQSRIFPRT | 821 |
| | H | | | | | |
| C12A3.2 | RASESVTILGSHLIY | 742 | LASNVQT | 782 | LQSRTIPRT | 822 |
| C13F12.1 | RASESVTILGSHLIY | 743 | LASNVQT | 783 | LQSRTIPRT | 823 |

[0524] In one embodiment, the BCMA binding domain comprises one or more (e.g., all three) light chain complementary determining region 1 (LC CDR1), light chain complementary determining region 2 (LC CDR2), and light chain complementary determining region 3 (LC CDR3) of a BCMA binding domain described herein, e.g., provided in Table 8, 9 or 11, and/or one or more (e.g., all three) heavy chain complementary determining region 1 (HC CDR1), heavy chain complementary determining region 2 (HC CDR2), and heavy chain complementary determining region 3 (HC CDR3) of a BCMA binding domain described herein, e.g., provided in Table 8, 9 or 10. In one embodiment, the BCMA binding domain comprises one, two, or all of LC CDR1, LC CDR2, and LC CDR3 of any amino acid sequences as provided in Table 8; and one, two or all of HC CDR1, HC CDR2, and HC CDR3 of any amino acid sequences as provided in Table 8.

[0525] In one embodiment, the BCMA antigen binding domain comprises:
[0526] (i) (a) a LC CDR1 amino acid sequence of SEQ ID NO: 714, a LC CDR2 amino acid sequence of SEQ ID NO: 754, and a LC CDR3 amino acid sequence of SEQ ID NO: 794; and
   [0527] (b) a HC CDR1 amino acid sequence of SEQ ID NO: 594, a HC CDR2 amino acid sequence of SEQ ID NO: 634, and a HC CDR3 amino acid sequence of SEQ ID NO: 674
[0528] (ii) (a) a LC CDR1 amino acid sequence of SEQ ID NO: 704, a LC CDR2 amino acid sequence of SEQ ID NO: 744, and a LC CDR3 amino acid sequence of SEQ ID NO: 784; and
   [0529] (b) a HC CDR1 amino acid sequence of SEQ ID NO: 584, a HC CDR2 amino acid sequence of SEQ ID NO: 624, and a HC CDR3 amino acid sequence of SEQ ID NO: 664
[0530] (iii) (a) a LC CDR1 amino acid sequence of SEQ ID NO: 705, a LC CDR2 amino acid sequence of SEQ ID NO: 745, and a LC CDR3 amino acid sequence of SEQ ID NO: 785; and
   [0531] (b) a HC CDR1 amino acid sequence of SEQ ID NO: 585, a HC CDR2 amino acid sequence of SEQ ID NO: 625, and a HC CDR3 amino acid sequence of SEQ ID NO: 665
[0532] (iv) (a) a LC CDR1 amino acid sequence of SEQ ID NO: 706, a LC CDR2 amino acid sequence of SEQ ID NO: 746, and a LC CDR3 amino acid sequence of SEQ ID NO: 786; and
   [0533] (b) a HC CDR1 amino acid sequence of SEQ ID NO: 586, a HC CDR2 amino acid sequence of SEQ ID NO: 626, and a HC CDR3 amino acid sequence of SEQ ID NO: 666
[0534] (v) (a) a LC CDR1 amino acid sequence of SEQ ID NO: 707, a LC CDR2 amino acid sequence of SEQ ID NO: 747, and a LC CDR3 amino acid sequence of SEQ ID NO: 787; and
   [0535] (b) a HC CDR1 amino acid sequence of SEQ ID NO: 587, a HC CDR2 amino acid sequence of SEQ ID NO: 627, and a HC CDR3 amino acid sequence of SEQ ID NO: 667
[0536] (vi) (a) a LC CDR1 amino acid sequence of SEQ ID NO: 708, a LC CDR2 amino acid sequence of SEQ ID NO: 748, and a LC CDR3 amino acid sequence of SEQ ID NO: 788; and
   [0537] (b) a HC CDR1 amino acid sequence of SEQ ID NO: 588, a HC CDR2 amino acid sequence of SEQ ID NO: 628, and a HC CDR3 amino acid sequence of SEQ ID NO: 668
[0538] (vii) (a) a LC CDR1 amino acid sequence of SEQ ID NO: 709, a LC CDR2 amino acid sequence of SEQ ID NO: 749, and a LC CDR3 amino acid sequence of SEQ ID NO: 789; and
   [0539] (b) a HC CDR1 amino acid sequence of SEQ ID NO: 589, a HC CDR2 amino acid sequence of SEQ ID NO: 629, and a HC CDR3 amino acid sequence of SEQ ID NO: 669
[0540] (viii) (a) a LC CDR1 amino acid sequence of SEQ ID NO: 710, a LC CDR2 amino acid sequence of SEQ ID NO: 750, and a LC CDR3 amino acid sequence of SEQ ID NO: 790; and
   [0541] (b) a HC CDR1 amino acid sequence of SEQ ID NO: 590, a HC CDR2 amino acid sequence of SEQ ID NO: 630, and a HC CDR3 amino acid sequence of SEQ ID NO: 670
[0542] (ix) (a) a LC CDR1 amino acid sequence of SEQ ID NO: 711, a LC CDR2 amino acid sequence of SEQ ID NO: 751, and a LC CDR3 amino acid sequence of SEQ ID NO: 791; and
   [0543] (b) a HC CDR1 amino acid sequence of SEQ ID NO: 591, a HC CDR2 amino acid sequence of SEQ ID NO: 631, and a HC CDR3 amino acid sequence of SEQ ID NO: 671
[0544] (x) (a) a LC CDR1 amino acid sequence of SEQ ID NO: 712, a LC CDR2 amino acid sequence of SEQ ID NO: 752, and a LC CDR3 amino acid sequence of SEQ ID NO: 792; and
   [0545] (b) a HC CDR1 amino acid sequence of SEQ ID NO: 592, a HC CDR2 amino acid sequence of SEQ ID NO: 632, and a HC CDR3 amino acid sequence of SEQ ID NO: 672
[0546] (xi) (a) a LC CDR1 amino acid sequence of SEQ ID NO: 713, a LC CDR2 amino acid sequence of SEQ ID NO: 753, and a LC CDR3 amino acid sequence of SEQ ID NO: 793; and
   [0547] (b) a HC CDR1 amino acid sequence of SEQ ID NO: 593, a HC CDR2 amino acid sequence of SEQ ID NO: 633, and a HC CDR3 amino acid sequence of SEQ ID NO: 673
[0548] (xii) (a) a LC CDR1 amino acid sequence of SEQ ID NO: 715, a LC CDR2 amino acid sequence of SEQ ID NO: 755, and a LC CDR3 amino acid sequence of SEQ ID NO: 795; and
   [0549] (b) a HC CDR1 amino acid sequence of SEQ ID NO: 595, a HC CDR2 amino acid sequence of SEQ ID NO: 635, and a HC CDR3 amino acid sequence of SEQ ID NO: 675
[0550] (xiii) (a) a LC CDR1 amino acid sequence of SEQ ID NO: 716, a LC CDR2 amino acid sequence of SEQ ID NO: 756, and a LC CDR3 amino acid sequence of SEQ ID NO: 796; and
   [0551] (b) a HC CDR1 amino acid sequence of SEQ ID NO: 596, a HC CDR2 amino acid sequence of SEQ ID NO: 636, and a HC CDR3 amino acid sequence of SEQ ID NO: 676
[0552] (xiv) (a) a LC CDR1 amino acid sequence of SEQ ID NO: 717, a LC CDR2 amino acid sequence of SEQ ID NO: 757, and a LC CDR3 amino acid sequence of SEQ ID NO: 797; and
   [0553] (b) a HC CDR1 amino acid sequence of SEQ ID NO: 597, a HC CDR2 amino acid sequence of SEQ ID NO: 637, and a HC CDR3 amino acid sequence of SEQ ID NO: 677
[0554] (xv) (a) a LC CDR1 amino acid sequence of SEQ ID NO: 718, a LC CDR2 amino acid sequence of SEQ ID NO: 758, and a LC CDR3 amino acid sequence of SEQ ID NO: 798; and
   [0555] (b) a HC CDR1 amino acid sequence of SEQ ID NO: 598, a HC CDR2 amino acid sequence of SEQ ID NO: 638, and a HC CDR3 amino acid sequence of SEQ ID NO: 678
[0556] (xvi) (a) a LC CDR1 amino acid sequence of SEQ ID NO: 719, a LC CDR2 amino acid sequence of SEQ ID NO: 759, and a LC CDR3 amino acid sequence of SEQ ID NO: 799; and
   [0557] (b) a HC CDR1 amino acid sequence of SEQ ID NO: 599, a HC CDR2 amino acid sequence of SEQ ID NO: 639, and a HC CDR3 amino acid sequence of SEQ ID NO: 679
[0558] (xvii) (a) a LC CDR1 amino acid sequence of SEQ ID NO: 720, a LC CDR2 amino acid sequence of SEQ ID NO: 760, and a LC CDR3 amino acid sequence of SEQ ID NO: 800; and
   [0559] (b) a HC CDR1 amino acid sequence of SEQ ID NO: 600, a HC CDR2 amino acid sequence of SEQ ID NO: 640, and a HC CDR3 amino acid sequence of SEQ ID NO: 680
[0560] (xviii) (a) a LC CDR1 amino acid sequence of SEQ ID NO: 721, a LC CDR2 amino acid sequence of SEQ ID NO: 761, and a LC CDR3 amino acid sequence of SEQ ID NO: 801; and
   [0561] (b) a HC CDR1 amino acid sequence of SEQ ID NO: 601, a HC CDR2 amino acid sequence of SEQ ID NO: 641, and a HC CDR3 amino acid sequence of SEQ ID NO: 681
[0562] (xix) (a) a LC CDR1 amino acid sequence of SEQ ID NO: 722, a LC CDR2 amino acid sequence of SEQ ID NO: 762, and a LC CDR3 amino acid sequence of SEQ ID NO: 802; and
   [0563] (b) a HC CDR1 amino acid sequence of SEQ ID NO: 602, a HC CDR2 amino acid sequence of SEQ ID NO: 642, and a HC CDR3 amino acid sequence of SEQ ID NO: 682
[0564] (xx) (a) a LC CDR1 amino acid sequence of SEQ ID NO: 723, a LC CDR2 amino acid sequence of SEQ ID NO: 763, and a LC CDR3 amino acid sequence of SEQ ID NO: 803; and
   [0565] (b) a HC CDR1 amino acid sequence of SEQ ID NO: 603, a HC CDR2 amino acid sequence of SEQ ID NO: 643, and a HC CDR3 amino acid sequence of SEQ ID NO: 683
[0566] (xxi) (a) a LC CDR1 amino acid sequence of SEQ ID NO: 724, a LC CDR2 amino acid sequence of SEQ ID NO: 764, and a LC CDR3 amino acid sequence of SEQ ID NO: 804; and
   [0567] (b) a HC CDR1 amino acid sequence of SEQ ID NO: 604, a HC CDR2 amino acid sequence of SEQ ID NO: 644, and a HC CDR3 amino acid sequence of SEQ ID NO: 684
[0568] (xxii) (a) a LC CDR1 amino acid sequence of SEQ ID NO: 725, a LC CDR2 amino acid sequence of SEQ ID NO: 765, and a LC CDR3 amino acid sequence of SEQ ID NO: 805; and
   [0569] (b) a HC CDR1 amino acid sequence of SEQ ID NO: 605, a HC CDR2 amino acid sequence of SEQ ID NO: 645, and a HC CDR3 amino acid sequence of SEQ ID NO: 685 or
[0570] (xxiii) (a) a LC CDR1 amino acid sequence of SEQ ID NO: 726, a LC CDR2 amino acid sequence of SEQ ID NO: 766, and a LC CDR3 amino acid sequence of SEQ ID NO: 806; and
   [0571] (b) a HC CDR1 amino acid sequence of SEQ ID NO: 606, a HC CDR2 amino acid sequence of SEQ ID NO: 646, and a HC CDR3 amino acid sequence of SEQ ID NO: 686.

[0572] In one embodiment, the BCMA binding domain comprises a light chain variable region described herein (e.g., in Table 8 or 9) and/or a heavy chain variable region described herein (e.g., in Table 8 or 9). In one embodiment, the BCMA binding domain is a scFv comprising a light chain and a heavy chain of an amino acid sequence listed in Table 8 or 9. In an embodiment, the BCMA binding domain (e.g., an scFv) comprises: a light chain variable region comprising an amino acid sequence having at least one, two or three modifications (e.g., substitutions, e.g., conservative substitutions) but not more than 30, 20 or 10 modifications (e.g., substitutions, e.g., conservative substitutions) of an amino acid sequence of a light chain variable region provided in Table 8 or 9, or a sequence with 95-99% identity with an amino acid sequence provided in Table 8 or 9; and/or a heavy chain variable region comprising an amino acid sequence having at least one, two or three modifications (e.g., substitutions, e.g., conservative substitutions) but not more than 30, 20 or 10 modifications (e.g., substitutions, e.g., conservative substitutions) of an amino acid sequence of a heavy chain variable region provided in Table 8 or 9, or a sequence with 95-99% identity to an amino acid sequence provided in Table 8 or 9.

[0573] In one embodiment, the BCMA binding domain comprises an amino acid sequence selected from a group consisting of SEQ ID NO: 249; SEQ ID NO: 239, SEQ ID NO: 240; SEQ ID NO: 241; SEQ ID NO: 242; SEQ ID NO: 243; SEQ ID NO: 244, SEQ ID NO: 245, SEQ ID NO: 246, SEQ ID NO: 247, SEQ ID NO: 248, SEQ ID NO: 250, SEQ ID NO: 251, SEQ ID NO: 252, SEQ ID NO: 253, SEQ ID NO: 329, SEQ ID NO: 330, SEQ ID NO: 331, SEQ ID NO: 332, SEQ ID NO: 333, SEQ ID NO: 334, SEQ ID NO: 335, SEQ ID NO: 336, SEQ ID NO: 337, SEQ ID NO: 338, SEQ ID NO: 339, SEQ ID NO: 340, SEQ ID NO: 341, SEQ ID NO: 342, SEQ ID NO: 343, SEQ ID NO: 344, SEQ ID NO: 345, SEQ ID NO: 346, SEQ ID NO: 347, SEQ ID NO: 348, SEQ ID NO: 349, SEQ ID NO: 463, SEQ ID NO: 464, SEQ ID NO: 465 and SEQ ID NO: 466; or an amino acid sequence having at least one, two or three modifications (e.g., substitutions, e.g., conservative substitutions) but not more than 30, 20 or 10 modifications (e.g., substitutions, e.g., conservative substitutions) to any of the aforesaid sequences; or a sequence with 95-99% identity to any of the aforesaid sequences. In one embodiment, the BCMA binding domain is a scFv, and a light chain variable region comprising an amino acid sequence described herein, e.g., in Table 8 or 9, is attached to a heavy chain variable region comprising an amino acid sequence described herein, e.g., in Table 8 or 9, via a linker, e.g., a linker described herein. In one embodiment, the BCMA binding domain includes a (Gly4-Ser) n linker, wherein n is 1, 2, 3, 4, 5, or 6 (SEQ ID NO: 10561), preferably 3 (SEQ ID NO: 35). The light chain variable region and heavy chain variable region of a scFv can be, e.g., in any of the following orientations: light chain variable region-linker-heavy chain variable region or heavy chain variable region-linker-light chain variable region.

[0574] Any known BCMA CAR, e.g., the BCMA antigen binding domain of any known BCMA CAR, in the art can be used in accordance with the instant disclosure. For example, those described herein.

### Exemplary CAR Molecules

[0575] In one aspect, a CAR, e.g., a CAR expressed by a cell disclosed herein, comprises a CAR molecule comprising an antigen binding domain that binds to a B cell antigen, e.g., as described herein, such as CD19 or BCMA.

[0576] In one embodiment, the CAR comprises a CAR molecule comprising a CD19 antigen binding domain (e.g., a murine, human or humanized antibody or antibody fragment that specifically binds to CD19), a transmembrane domain, and an intracellular signaling domain (e.g., an intracellular signaling domain comprising a costimulatory domain and/or a primary signaling domain).

[0577] Exemplary CAR molecules described herein are provided in Table 12. The CAR molecules in Table 12 comprise a CD19 antigen binding domain, e.g., an amino acid sequence of any CD19 antigen binding domain provided in Table 4. Any of the exemplary CAR molecules listed below, or combinations thereof, can be used with the cells and methods disclosed herein.

TABLE 12
Exemplary CD19 CAR molecules

| | | | SEQ |
|---|---|---|---|
| | | | ID |
| Antigen | Name | Amino Acid Sequence | NO: |
| CD19 | CTL019 | MALPVTALLLPLALLLHAARPDIQMTQTTSSLSASLGDRVTISCRASQ | 185 |
| | | DISKYLNWYQQKPDGTVKLLIYHTSRLHSGVPSRFSGSGSGTDYSLTI | |
| | | SNLEQEDIATYFCQQGNTLPYTFGGGTKLEITGGGGSGGGGSGGGGSE | |
| | | VKLQESGPGLVAPSQSLSVTCTVSGVSLPDYGVSWIRQPPRKGLEWLG | |
| | | VIWGSETTYYNSALKSRLTIIKDNSKSQVFLKMNSLQTDDTAIYYCAK | |
| | | HYYYGGSYAMDYWGQGTSVTVSSTTTPAPRPPTPAPTIASQPLSLRPE | |
| | | ACRPAAGGAVHTRGLDFACDIYIWAPLAGTCGVLLLSLVITLYCKRGR | |
| | | KKLLYIFKQPFMRPVQTTQEEDGCSCRFPEEEEGGCELRVKESRSADA | |
| | | PAYKQGQNQLYNELNLGRREEYDVLDKRRGRDPEMGGKPRRKNPQEGL | |
| | | YNELQKDKMAEAYSEIGMKGERRRGKGHDGLYQGLSTATKDTYDALHM | |
| | | QALPPR | |
| CD19 | CAR 1 | MALPVTALLLPLALLLHAARPEIVMTQSPATLSLSPGERATLSCRASQ | 186 |
| | | DISKYLNWYQQKPGQAPRLLIYHTSRLHSGIPARFSGSGSGTDYTLTI | |
| | | SSLQPEDFAVYFCQQGNTLPYTFGQGTKLEIKGGGGSGGGGSGGGGSQ | |
| | | VQLQESGPGLVKPSETLSLTCTVSGVSLPDYGVSWIRQPPGKGLEWIG | |
| | | VIWGSETTYYSSSLKSRVTISKDNSKNQVSLKLSSVTAADTAVYYCAK | |
| | | HYYYGGSYAMDYWGQGTLVTVSSTTTPAPRPPTPAPTIASQPLSLRPE | |
| | | ACRPAAGGAVHTRGLDFACDIYIWAPLAGTCGVLLLSLVITLYCKRGR | |
| | | KKLLYIFKQPFMRPVQTTQEEDGCSCRFPEEEEGGCELRVKESRSADA | |
| | | PAYKQGQNQLYNELNLGRREEYDVLDKRRGRDPEMGGKPRRKNPQEGL | |
| | | YNELQKDKMAEAYSEIGMKGERRRGKGHDGLYQGLSTATKDTYDALHM | |
| | | QALPPR | |
| CD19 | CAR 2 | MALPVTALLLPLALLLHAARPEIVMTQSPATLSLSPGERATLSCRASQ | 187 |
| | | DISKYLNWYQQKPGQAPRLLIYHTSRLHSGIPARFSGSGSGTDYTLTI | |
| | | SSLQPEDFAVYFCQQGNTLPYTFGQGTKLEIKGGGGSGGGGSGGGGSQ | |
| | | VQLQESGPGLVKPSETLSLTCTVSGVSLPDYGVSWIRQPPGKGLEWIG | |
| | | VIWGSETTYYQSSLKSRVTISKDNSKNQVSLKLSSVTAADTAVYYCAK | |
| | | HYYYGGSYAMDYWGQGTLVTVSSTTTPAPRPPTPAPTIASQPLSLRPE | |
| | | ACRPAAGGAVHTRGLDFACDIYIWAPLAGTCGVLLLSLVITLYCKRGR | |
| | | KKLLYIFKQPFMRPVQTTQEEDGCSCRFPEEEEGGCELRVKESRSADA | |
| | | PAYKQGQNQLYNELNLGRREEYDVLDKRRGRDPEMGGKPRRKNPQEGL | |
| | | YNELQKDKMAEAYSEIGMKGERRRGKGHDGLYQGLSTATKDTYDALHM | |
| | | QALPPR | |
| CD19 | CAR 3 | MALPVTALLLPLALLLHAARPQVQLQESGPGLVKPSETLSLTCTVSGV | 188 |
| | | SLPDYGVSWIRQPPGKGLEWIGVIWGSETTYYSSSLKSRVTISKDNSK | |
| | | NQVSLKLSSVTAADTAVYYCAKHYYYGGSYAMDYWGQGTLVTVSSGGG | |
| | | GSGGGGSGGGGSEIVMTQSPATLSLSPGERATLSCRASQDISKYLNWY | |
| | | QQKPGQAPRLLIYHTSRLHSGIPARFSGSGSGTDYTLTISSLQPEDFA | |
| | | VYFCQQGNTLPYTFGQGTKLEIKTTTPAPRPPTPAPTIASQPLSLRPE | |
| | | ACRPAAGGAVHTRGLDFACDIYIWAPLAGTCGVLLLSLVITLYCKRGR | |
| | | KKLLYIFKQPFMRPVQTTQEEDGCSCRFPEEEEGGCELRVKFSRSADA | |
| | | PAYKQGQNQLYNELNLGRREEYDVLDKRRGRDPEMGGKPRRKNPQEGL | |
| | | YNELQKDKMAEAYSEIGMKGERRRGKGHDGLYQGLSTATKDTYDALHM | |
| | | QALPPR | |
| CD19 | CAR 4 | MALPVTALLLPLALLLHAARPQVQLQESGPGLVKPSETLSLTCTVSGV | 189 |
| | | SLPDYGVSWIRQPPGKGLEWIGVIWGSETTYYQSSLKSRVTISKDNSK | |
| | | NQVSLKLSSVTAADTAVYYCAKHYYYGGSYAMDYWGQGTLVTVSSGGG | |
| | | GSGGGGSGGGGSEIVMTQSPATLSLSPGERATLSCRASQDISKYLNWY | |
| | | QQKPGQAPRLLIYHTSRLHSGIPARFSGSGSGTDYTLTISSLQPEDFA | |
| | | VYFCQQGNTLPYTFGQGTKLEIKTTTPAPRPPTPAPTIASQPLSLRPE | |
| | | ACRPAAGGAVHTRGLDFACDIYIWAPLAGTCGVLLLSLVITLYCKRGR | |
| | | KKLLYIFKQPFMRPVQTTQEEDGCSCRFPEEEEGGCELRVKESRSADA | |
| | | PAYKQGQNQLYNELNLGRREEYDVLDKRRGRDPEMGGKPRRKNPQEGL | |
| | | YNELQKDKMAEAYSEIGMKGERRRGKGHDGLYQGLSTATKDTYDALHM | |
| | | QALPPR | |
| CD19 | CAR 5 | MALPVTALLLPLALLLHAARPEIVMTQSPATLSLSPGERATLSCRASQ | 190 |
| | | DISKYLNWYQQKPGQAPRLLIYHTSRLHSGIPARFSGSGSGTDYTLTI | |
| | | SSLQPEDFAVYFCQQGNTLPYTFGQGTKLEIKGGGGSGGGGSGGGGSG | |
| | | GGGSQVQLQESGPGLVKPSETLSLTCTVSGVSLPDYGVSWIRQPPGKG | |
| | | LEWIGVIWGSETTYYSSSLKSRVTISKDNSKNQVSLKLSSVTAADTAV | |
| | | YYCAKHYYYGGSYAMDYWGQGTLVTVSSTTTPAPRPPTPAPTIASQPL | |
| | | SLRPEACRPAAGGAVHTRGLDFACDIYIWAPLAGTCGVLLLSLVITLY | |
| | | CKRGRKKLLYIFKQPFMRPVQTTQEEDGCSCRFPEEEEGGCELRVKFS | |
| | | RSADAPAYKQGQNQLYNELNLGRREEYDVLDKRRGRDPEMGGKPRRKN | |
| | | PQEGLYNELQKDKMAEAYSEIGMKGERRRGKGHDGLYQGLSTATKDTY | |
| | | DALHMQALPPR | |
| CD19 | CAR 6 | MALPVTALLLPLALLLHAARPEIVMTQSPATLSLSPGERATLSCRASQ | 191 |
| | | DISKYLNWYQQKPGQAPRLLIYHTSRLHSGIPARFSGSGSGTDYTLTI | |
| | | SSLQPEDFAVYFCQQGNTLPYTFGQGTKLEIKGGGGSGGGGSGGGGSG | |
| | | GGGSQVQLQESGPGLVKPSETLSLTCTVSGVSLPDYGVSWIRQPPGKG | |
| | | LEWIGVIWGSETTYYQSSLKSRVTISKDNSKNQVSLKLSSVTAADTAV | |
| | | YYCAKHYYYGGSYAMDYWGQGTLVTVSSTTTPAPRPPTPAPTIASQPL | |
| | | SLRPEACRPAAGGAVHTRGLDFACDIYIWAPLAGTCGVLLLSLVITLY | |
| | | CKRGRKKLLYIFKQPFMRPVQTTQEEDGCSCRFPEEEEGGCELRVKFS | |
| | | RSADAPAYKQGQNQLYNELNLGRREEYDVLDKRRGRDPEMGGKPRRKN | |
| | | PQEGLYNELQKDKMAEAYSEIGMKGERRRGKGHDGLYQGLSTATKDTY | |
| | | DALHMQALPPR | |
| CD19 | CAR 7 | MALPVTALLLPLALLLHAARPQVQLQESGPGLVKPSETLSLTCTVSGV | 192 |
| | | SLPDYGVSWIRQPPGKGLEWIGVIWGSETTYYSSSLKSRVTISKDNSK | |
| | | NQVSLKLSSVTAADTAVYYCAKHYYYGGSYAMDYWGQGTLVTVSSGGG | |
| | | GSGGGGSGGGGSGGGGSEIVMTQSPATLSLSPGERATLSCRASQDISK | |
| | | YLNWYQQKPGQAPRLLIYHTSRLHSGIPARFSGSGSGTDYTLTISSLQ | |
| | | PEDFAVYFCQQGNTLPYTFGQGTKLEIKTTTPAPRPPTPAPTIASQPL | |
| | | SLRPEACRPAAGGAVHTRGLDFACDIYIWAPLAGTCGVLLLSLVITLY | |
| | | CKRGRKKLLYIFKQPFMRPVQTTQEEDGCSCRFPEEEEGGCELRVKFS | |
| | | RSADAPAYKQGQNQLYNELNLGRREEYDVLDKRRGRDPEMGGKPRRKN | |
| | | PQEGLYNELQKDKMAEAYSEIGMKGERRRGKGHDGLYQGLSTATKDTY | |
| | | DALHMQALPPR | |
| CD19 | CAR 8 | MALPVTALLLPLALLLHAARPQVQLQESGPGLVKPSETLSLTCTVSGV | 193 |
| | | SLPDYGVSWIRQPPGKGLEWIGVIWGSETTYYQSSLKSRVTISKDNSK | |
| | | NQVSLKLSSVTAADTAVYYCAKHYYYGGSYAMDYWGQGTLVTVSSGGG | |
| | | GSGGGGSGGGGSGGGGSEIVMTQSPATLSLSPGERATLSCRASQDISK | |
| | | YLNWYQQKPGQAPRLLIYHTSRLHSGIPARFSGSGSGTDYTLTISSLQ | |
| | | PEDFAVYFCQQGNTLPYTFGQGTKLEIKTTTPAPRPPTPAPTIASQPL | |
| | | SLRPEACRPAAGGAVHTRGLDFACDIYIWAPLAGTCGVLLLSLVITLY | |
| | | CKRGRKKLLYIFKQPFMRPVQTTQEEDGCSCRFPEEEEGGCELRVKFS | |
| | | RSADAPAYKQGQNQLYNELNLGRREEYDVLDKRRGRDPEMGGKPRRKN | |
| | | PQEGLYNELQKDKMAEAYSEIGMKGERRRGKGHDGLYQGLSTATKDTY | |
| | | DALHMQALPPR | |
| CD19 | CAR 9 | MALPVTALLLPLALLLHAARPEIVMTQSPATLSLSPGERATLSCRASQ | 194 |
| | | DISKYLNWYQQKPGQAPRLLIYHTSRLHSGIPARFSGSGSGTDYTLTI | |
| | | SSLQPEDFAVYFCQQGNTLPYTFGQGTKLEIKGGGGSGGGGSGGGGSG | |
| | | GGGSQVQLQESGPGLVKPSETLSLTCTVSGVSLPDYGVSWIRQPPGKG | |
| | | LEWIGVIWGSETTYYNSSLKSRVTISKDNSKNQVSLKLSSVTAADTAV | |
| | | YYCAKHYYYGGSYAMDYWGQGTLVTVSSTTTPAPRPPTPAPTIASQPL | |
| | | SLRPEACRPAAGGAVHTRGLDFACDIYIWAPLAGTCGVLLLSLVITLY | |
| | | CKRGRKKLLYIFKQPFMRPVQTTQEEDGCSCRFPEEEEGGCELRVKFS | |
| | | RSADAPAYKQGQNQLYNELNLGRREEYDVLDKRRGRDPEMGGKPRRKN | |
| | | PQEGLYNELQKDKMAEAYSEIGMKGERRRGKGHDGLYQGLSTATKDTY | |
| | | DALHMQALPPR | |
| CD19 | CAR 10 | MALPVTALLLPLALLLHAARPEIVMTQSPATLSLSPGERATLSCRASQ | 195 |
| | | DISKYLNWYQQKPGQAPRLLIYHTSRLHSGIPARFSGSGSGTDYTLTI | |
| | | SSLQPEDFAVYFCQQGNTLPYTFGQGTKLEIKGGGGSGGGGSGGGGSG | |
| | | GGGSQVQLQESGPGLVKPSETLSLTCTVSGVSLPDYGVSWIRQPPGKG | |
| | | LEWIGVIWGSETTYYNSSLKSRVTISKDNSKNQVSLKLSSVTAADTAV | |
| | | YYCAKHYYYGGSYAMDYWGQGTLVTVSSTTTPAPRPPTPAPTIASQPL | |
| | | SLRPEACRPAAGGAVHTRGLDFACDIYIWAPLAGTCGVLLLSLVITLY | |
| | | CKRGRKKLLYIFKQPFMRPVQTTQEEDGCSCRFPEEEEGGCELRVKFS | |
| | | RSADAPAYKQGQNQLYNELNLGRREEYDVLDKRRGRDPEMGGKPRRKN | |
| | | PQEGLYNELQKDKMAEAYSEIGMKGERRRGKGHDGLYQGLSTATKDTY | |
| | | DALHMQALPPR | |
| CD19 | CAR 11 | MALPVTALLLPLALLLHAARPQVQLQESGPGLVKPSETLSLTCTVSGV | 196 |
| | | SLPDYGVSWIRQPPGKGLEWIGVIWGSETTYYNSSLKSRVTISKDNSK | |
| | | NQVSLKLSSVTAADTAVYYCAKHYYYGGSYAMDYWGQGTLVTVSSGGG | |
| | | GSGGGGSGGGGSGGGGSEIVMTQSPATLSLSPGERATLSCRASQDISK | |
| | | YLNWYQQKPGQAPRLLIYHTSRLHSGIPARFSGSGSGTDYTLTISSLQ | |
| | | PEDFAVYFCQQGNTLPYTFGQGTKLEIKTTTPAPRPPTPAPTIASQPL | |
| | | SLRPEACRPAAGGAVHTRGLDFACDIYIWAPLAGTCGVLLLSLVITLY | |
| | | CKRGRKKLLYIFKQPFMRPVQTTQEEDGCSCRFPEEEEGGCELRVKFS | |
| | | RSADAPAYKQGQNQLYNELNLGRREEYDVLDKRRGRDPEMGGKPRRKN | |
| | | PQEGLYNELQKDKMAEAYSEIGMKGERRRGKGHDGLYQGLSTATKDTY | |
| | | DALHMQALPPR | |
| CD19 | CAR 12 | MALPVTALLLPLALLLHAARPEIVMTQSPATLSLSPGERATLSCRASQ | 197 |
| | | DISKYLNWYQQKPGQAPRLLIYHTSRLHSGIPARFSGSGSGTDYTLTI | |
| | | SSLQPEDFAVYFCQQGNTLPYTFGQGTKLEIKGGGGSGGGGSGGGGSQ | |
| | | VQLQESGPGLVKPSETLSLTCTVSGVSLPDYGVSWIRQPPGKGLEWIG | |
| | | VIWGSETTYYNSSLKSRVTISKDNSKNQVSLKLSSVTAADTAVYYCAK | |
| | | HYYYGGSYAMDYWGQGTLVTVSSTTTPAPRPPTPAPTIASQPLSLRPE | |
| | | ACRPAAGGAVHTRGLDFACDIYIWAPLAGTCGVLLLSLVITLYCKRGR | |
| | | KKLLYIFKQPFMRPVQTTQEEDGCSCRFPEEEEGGCELRVKESRSADA | |
| | | PAYKQGQNQLYNELNLGRREEYDVLDKRRGRDPEMGGKPRRKNPQEGL | |
| | | YNELQKDKMAEAYSEIGMKGERRRGKGHDGLYQGLSTATKDTYDALHM | |
| | | QALPPR | |

[0578] In one embodiment, the CAR molecule comprises (or consists of) an amino acid sequence as provided in Table 12, or in Table 3 of International Publication No. WO2014/153270, filed Mar. 15, 2014; incorporated herein by reference. In one embodiment, the CAR molecule comprises (or consists of) an amino acid sequence of SEQ ID NO: 185, SEQ ID NO: 186, SEQ ID NO: 187, SEQ ID NO: 188, SEQ ID NO: 189, SEQ ID NO: 190, SEQ ID NO: 191, SEQ ID NO: 192, SEQ ID NO: 193, SEQ ID NO: 194, SEQ ID NO: 195, SEQ ID NO: 196, or SEQ ID NO: 197; or an amino acid sequence having at least one, two, three, four, five, 10, 15, 20 or 30 modifications (e.g., substitutions, e.g., conservative substitutions) but not more than 60, 50, or 40 modifications (e.g., substitutions, e.g., conservative substitutions) of an amino acid sequence of SEQ ID NO: 185, SEQ ID NO: 186, SEQ ID NO: 187, SEQ ID NO: 188, SEQ ID NO: 189, SEQ ID NO: 190, SEQ ID NO: 191, SEQ ID NO: 192, SEQ ID NO: 193, SEQ ID NO: 194, SEQ ID NO: 195, SEQ ID NO: 196, or SEQ ID NO: 197; or an amino acid sequence having 85%, 90%, 95%, 96%, 97%, 98%, 99% identity to an amino acid sequence of SEQ ID NO: 185, SEQ ID NO: 186, SEQ ID NO: 187, SEQ ID NO: 188, SEQ ID NO: 189, SEQ ID NO: 190, SEQ ID NO: 191, SEQ ID NO: 192, SEQ ID NO: 193, SEQ ID NO: 194, SEQ ID NO: 195, SEQ ID NO: 196, or SEQ ID NO: 197.

[0579] In one aspect, a CAR, e.g., a CAR expressed by a cell disclosed herein, comprises a CAR molecule comprising an antigen binding domain that binds to BCMA, e.g., comprises a BCMA antigen binding domain (e.g., a murine, human or humanized antibody or antibody fragment that specifically binds to BCMA, e.g., human BCMA), a transmembrane domain, and an intracellular signaling domain (e.g., an intracellular signaling domain comprising a costimulatory domain and/or a primary signaling domain).

[0580] Exemplary CAR molecules are provided in Table 13, or Table 1 of WO2016/014565, or as otherwise described herein. The CAR molecules in Table 13 comprise a BCMA antigen binding domain, e.g., an amino acid sequence of any BCMA antigen binding domain provided in Table 8 or 9. of the exemplary CAR molecules listed below, or combinations thereof, can be used with the cells and methods disclosed herein.

TABLE 13
Exemplary BCMA CAR molecules. Sequences are provided with a leader sequence.

| | | |
|---|---|---|
| | SEQ | |
| Name/ | ID | |
| Description | NO: | Sequence |

139109

| | | |
|---|---|---|
| 139109-aa | 859 | MALPVTALLLPLALLLHAARPEVQLVESGGGLVQPGGSLRLSCAVSGFALS |
| Full CAR | | NHGMSWVRRAPGKGLEWVSGIVYSGSTYYAASVKGRFTISRDNSRNTLYLQ |
| | | MNSLRPEDTAIYYCSAHGGESDVWGQGTTVTVSSASGGGGSGGRASGGGGS |
| | | DIQLTQSPSSLSASVGDRVTITCRASQSISSYLNWYQQKPGKAPKLLIYAA |
| | | SSLQSGVPSRESGSGSGTDFTLTISSLQPEDFATYYCQQSYSTPYTFGQGT |
| | | KVEIKTTTPAPRPPTPAPTIASQPLSLRPEACRPAAGGAVHTRGLDFACDI |
| | | YIWAPLAGTCGVLLLSLVITLYCKRGRKKLLYIFKQPFMRPVQTTQEEDGC |
| | | SCRFPEEEEGGCELRVKFSRSADAPAYKQGQNQLYNELNLGRREEYDVLDK |
| | | RRGRDPEMGGKPRRKNPQEGLYNELQKDKMAEAYSEIGMKGERRRGKGHDG |
| | | LYQGLSTATKDTYDALHMQALPPR |
| 139109-nt | 874 | ATGGCCCTCCCTGTCACCGCCCTGCTGCTTCCGCTGGCTCTTCTGCTCCAC |
| Full CAR | | GCCGCTCGGCCCGAAGTGCAATTGGTGGAATCAGGGGGAGGACTTGTGCAG |
| | | CCTGGAGGATCGCTGAGACTGTCATGTGCCGTGTCCGGCTTTGCCCTGTCC |
| | | AACCACGGGATGTCCTGGGTCCGCCGCGCGCCTGGAAAGGGCCTCGAATGG |
| | | GTGTCGGGTATTGTGTACAGCGGTAGCACCTACTATGCCGCATCCGTGAAG |
| | | GGGAGATTCACCATCAGCCGGGACAACTCCAGGAACACTCTGTACCTCCAA |
| | | ATGAATTCGCTGAGGCCAGAGGACACTGCCATCTACTACTGCTCCGCGCAT |
| | | GGCGGAGAGTCCGACGTCTGGGGACAGGGGACCACCGTGACCGTGTCTAGC |
| | | GCGTCCGGCGGAGGCGGCAGCGGGGGTCGGGCATCAGGGGGCGGCGGATCG |
| | | GACATCCAGCTCACCCAGTCCCCGAGCTCGCTGTCCGCCTCCGTGGGAGAT |
| | | CGGGTCACCATCACGTGCCGCGCCAGCCAGTCGATTTCCTCCTACCTGAAC |
| | | TGGTACCAACAGAAGCCCGGAAAAGCCCCGAAGCTTCTCATCTACGCCGCC |
| | | TCGAGCCTGCAGTCAGGAGTGCCCTCACGGTTCTCCGGCTCCGGTTCCGGT |
| | | ACTGATTTCACCCTGACCATTTCCTCCCTGCAACCGGAGGACTTCGCTACT |
| | | TACTACTGCCAGCAGTCGTACTCCACCCCCTACACTTTCGGACAAGGCACC |
| | | AAGGTCGAAATCAAGACCACTACCCCAGCACCGAGGCCACCCACCCCGGCT |
| | | CCTACCATCGCCTCCCAGCCTCTGTCCCTGCGTCCGGAGGCATGTAGACCC |
| | | GCAGCTGGTGGGGCCGTGCATACCCGGGGTCTTGACTTCGCCTGCGATATC |
| | | TACATTTGGGCCCCTCTGGCTGGTACTTGCGGGGTCCTGCTGCTTTCACTC |
| | | GTGATCACTCTTTACTGTAAGCGCGGTCGGAAGAAGCTGCTGTACATCTTT |
| | | AAGCAACCCTTCATGAGGCCTGTGCAGACTACTCAAGAGGAGGACGGCTGT |
| | | TCATGCCGGTTCCCAGAGGAGGAGGAAGGCGGCTGCGAACTGCGCGTGAAA |
| | | TTCAGCCGCAGCGCAGATGCTCCAGCCTACAAGCAGGGGCAGAACCAGCTC |
| | | TACAACGAACTCAATCTTGGTCGGAGAGAGGAGTACGACGTGCTGGACAAG |
| | | CGGAGAGGACGGGACCCAGAAATGGGCGGGAAGCCGCGCAGAAAGAATCCC |
| | | CAAGAGGGCCTGTACAACGAGCTCCAAAAGGATAAGATGGCAGAAGCCTAT |
| | | AGCGAGATTGGTATGAAAGGGGAACGCAGAAGAGGCAAAGGCCACGACGGA |
| | | CTGTACCAGGGACTCAGCACCGCCACCAAGGACACCTATGACGCTCTTCAC |
| | | ATGCAGGCCCTGCCGCCTCGG |

139103

| | | |
|---|---|---|
| 139103-aa | 849 | MALPVTALLLPLALLLHAARPQVQLVESGGGLVQPGRSLRLSCAASGFTFS |
| Full CAR | | NYAMSWVRQAPGKGLGWVSGISRSGENTYYADSVKGRFTISRDNSKNTLYL |
| | | QMNSLRDEDTAVYYCARSPAHYYGGMDVWGQGTTVTVSSASGGGGSGGRAS |
| | | GGGGSDIVLTQSPGTLSLSPGERATLSCRASQSISSSFLAWYQQKPGQAPR |
| | | LLIYGASRRATGIPDRFSGSGSGTDFTLTISRLEPEDSAVYYCQQYHSSPS |
| | | WTFGQGTKLEIKTTTPAPRPPTPAPTIASQPLSLRPEACRPAAGGAVHTRG |
| | | LDFACDIYIWAPLAGTCGVLLLSLVITLYCKRGRKKLLYIFKQPFMRPVQT |
| | | TQEEDGCSCRFPEEEEGGCELRVKESRSADAPAYKQGQNQLYNELNLGRRE |
| | | EYDVLDKRRGRDPEMGGKPRRKNPQEGLYNELQKDKMAEAYSEIGMKGERR |
| | | RGKGHDGLYQGLSTATKDTYDALHMQALPPR |
| 139103-nt | 864 | ATGGCCCTCCCTGTCACCGCCCTGCTGCTTCCGCTGGCTCTTCTGCTCCAC |
| Full CAR | | GCCGCTCGGCCCCAAGTGCAACTCGTGGAATCTGGTGGAGGACTCGTGCAA |
| | | CCCGGAAGATCGCTTAGACTGTCGTGTGCCGCCAGCGGGTTCACTTTCTCG |
| | | AACTACGCGATGTCCTGGGTCCGCCAGGCACCCGGAAAGGGACTCGGTTGG |
| | | GTGTCCGGCATTTCCCGGTCCGGCGAAAATACCTACTACGCCGACTCCGTG |
| | | AAGGGCCGCTTCACCATCTCAAGGGACAACAGCAAAAACACCCTGTACTTG |
| | | CAAATGAACTCCCTGCGGGATGAAGATACAGCCGTGTACTATTGCGCCCGG |
| | | TCGCCTGCCCATTACTACGGCGGAATGGACGTCTGGGGACAGGGAACCACT |
| | | GTGACTGTCAGCAGCGCGTCGGGTGGCGGCGGCTCAGGGGGTCGGGCCTCC |
| | | GGGGGGGGAGGGTCCGACATCGTGCTGACCCAGTCCCCGGGAACCCTGAGC |
| | | CTGAGCCCGGGAGAGCGCGCGACCCTGTCATGCCGGGCATCCCAGAGCATT |
| | | AGCTCCTCCTTTCTCGCCTGGTATCAGCAGAAGCCCGGACAGGCCCCGAGG |
| | | CTGCTGATCTACGGCGCTAGCAGAAGGGCTACCGGAATCCCAGACCGGTTC |
| | | TCCGGCTCCGGTTCCGGGACCGATTTCACCCTTACTATCTCGCGCCTGGAA |
| | | CCTGAGGACTCCGCCGTCTACTACTGCCAGCAGTACCACTCATCCCCGTCG |
| | | TGGACGTTCGGACAGGGCACCAAGCTGGAGATTAAGACCACTACCCCAGCA |
| | | CCGAGGCCACCCACCCCGGCTCCTACCATCGCCTCCCAGCCTCTGTCCCTG |
| | | CGTCCGGAGGCATGTAGACCCGCAGCTGGTGGGGCCGTGCATACCCGGGGT |
| | | CTTGACTTCGCCTGCGATATCTACATTTGGGCCCCTCTGGCTGGTACTTGC |
| | | GGGGTCCTGCTGCTTTCACTCGTGATCACTCTTTACTGTAAGCGCGGTCGG |
| | | AAGAAGCTGCTGTACATCTTTAAGCAACCCTTCATGAGGCCTGTGCAGACT |
| | | ACTCAAGAGGAGGACGGCTGTTCATGCCGGTTCCCAGAGGAGGAGGAAGGC |
| | | GGCTGCGAACTGCGCGTGAAATTCAGCCGCAGCGCAGATGCTCCAGCCTAC |
| | | AAGCAGGGGCAGAACCAGCTCTACAACGAACTCAATCTTGGTCGGAGAGAG |
| | | GAGTACGACGTGCTGGACAAGCGGAGAGGACGGGACCCAGAAATGGGCGGG |
| | | AAGCCGCGCAGAAAGAATCCCCAAGAGGGCCTGTACAACGAGCTCCAAAAG |
| | | GATAAGATGGCAGAAGCCTATAGCGAGATTGGTATGAAAGGGGAACGCAGA |
| | | AGAGGCAAAGGCCACGACGGACTGTACCAGGGACTCAGCACCGCCACCAAG |
| | | GACACCTATGACGCTCTTCACATGCAGGCCCTGCCGCCTCGG |

139105

| | | |
|---|---|---|
| 139105-aa | 850 | MALPVTALLLPLALLLHAARPQVQLVESGGGLVQPGRSLRLSCAASGFTFD |
| Full CAR | | DYAMHWVRQAPGKGLEWVSGISWNSGSIGYADSVKGRFTISRDNAKNSLYL |
| | | QMNSLRAEDTALYYCSVHSFLAYWGQGTLVTVSSASGGGGSGGRASGGGGS |
| | | DIVMTQTPLSLPVTPGEPASISCRSSQSLLHSNGYNYLDWYLQKPGQSPQL |
| | | LIYLGSNRASGVPDRFSGSGSGTDFTLKISRVEAEDVGVYYCMQALQTPYT |
| | | FGQGTKVEIKTTTPAPRPPTPAPTIASQPLSLRPEACRPAAGGAVHTRGLD |
| | | FACDIYIWAPLAGTCGVLLLSLVITLYCKRGRKKLLYIFKQPFMRPVQTTQ |
| | | EEDGCSCRFPEEEEGGCELRVKESRSADAPAYKQGQNQLYNELNLGRREEY |
| | | DVLDKRRGRDPEMGGKPRRKNPQEGLYNELQKDKMAEAYSEIGMKGERRRG |
| | | KGHDGLYQGLSTATKDTYDALHMQALPPR |
| 139105-nt | 865 | ATGGCCCTCCCTGTCACCGCCCTGCTGCTTCCGCTGGCTCTTCTGCTCCAC |
| Full CAR | | GCCGCTCGGCCCCAAGTGCAACTCGTCGAATCCGGTGGAGGTCTGGTCCAA |
| | | CCTGGTAGAAGCCTGAGACTGTCGTGTGCGGCCAGCGGATTCACCTTTGAT |
| | | GACTATGCTATGCACTGGGTGCGGCAGGCCCCAGGAAAGGGCCTGGAATGG |
| | | GTGTCGGGAATTAGCTGGAACTCCGGGTCCATTGGCTACGCCGACTCCGTG |
| | | AAGGGCCGCTTCACCATCTCCCGCGACAACGCAAAGAACTCCCTGTACTTG |
| | | CAAATGAACTCGCTCAGGGCTGAGGATACCGCGCTGTACTACTGCTCCGTG |
| | | CATTCCTTCCTGGCCTACTGGGGACAGGGAACTCTGGTCACCGTGTCGAGC |
| | | GCCTCCGGCGGCGGGGGCTCGGGTGGACGGGCCTCGGGCGGAGGGGGGTCC |
| | | GACATCGTGATGACCCAGACCCCGCTGAGCTTGCCCGTGACTCCCGGAGAG |
| | | CCTGCATCCATCTCCTGCCGGTCATCCCAGTCCCTTCTCCACTCCAACGGA |
| | | TACAACTACCTCGACTGGTACCTCCAGAAGCCGGGACAGAGCCCTCAGCTT |
| | | CTGATCTACCTGGGGTCAAATAGAGCCTCAGGAGTGCCGGATCGGTTCAGC |
| | | GGATCTGGTTCGGGAACTGATTTCACTCTGAAGATTTCCCGCGTGGAAGCC |
| | | GAGGACGTGGGCGTCTACTACTGTATGCAGGCGCTGCAGACCCCCTATACC |
| | | TTCGGCCAAGGGACGAAAGTGGAGATCAAGACCACTACCCCAGCACCGAGG |
| | | CCACCCACCCCGGCTCCTACCATCGCCTCCCAGCCTCTGTCCCTGCGTCCG |
| | | GAGGCATGTAGACCCGCAGCTGGTGGGGCCGTGCATACCCGGGGTCTTGAC |
| | | TTCGCCTGCGATATCTACATTTGGGCCCCTCTGGCTGGTACTTGCGGGGTC |
| | | CTGCTGCTTTCACTCGTGATCACTCTTTACTGTAAGCGCGGTCGGAAGAAG |
| | | CTGCTGTACATCTTTAAGCAACCCTTCATGAGGCCTGTGCAGACTACTCAA |
| | | GAGGAGGACGGCTGTTCATGCCGGTTCCCAGAGGAGGAGGAAGGCGGCTGC |
| | | GAACTGCGCGTGAAATTCAGCCGCAGCGCAGATGCTCCAGCCTACAAGCAG |
| | | GGGCAGAACCAGCTCTACAACGAACTCAATCTTGGTCGGAGAGAGGAGTAC |
| | | GACGTGCTGGACAAGCGGAGAGGACGGGACCCAGAAATGGGCGGGAAGCCG |
| | | CGCAGAAAGAATCCCCAAGAGGGCCTGTACAACGAGCTCCAAAAGGATAAG |
| | | ATGGCAGAAGCCTATAGCGAGATTGGTATGAAAGGGGAACGCAGAAGAGGC |
| | | AAAGGCCACGACGGACTGTACCAGGGACTCAGCACCGCCACCAAGGACACC |
| | | TATGACGCTCTTCACATGCAGGCCCTGCCGCCTCGG |

139111

| | | |
|---|---|---|
| 139111-aa | 851 | MALPVTALLLPLALLLHAARPEVQLLESGGGLVQPGGSLRLSCAVSGFALS |
| Full CAR | | NHGMSWVRRAPGKGLEWVSGIVYSGSTYYAASVKGRFTISRDNSRNTLYLQ |
| | | MNSLRPEDTAIYYCSAHGGESDVWGQGTTVTVSSASGGGGSGGRASGGGGS |
| | | DIVMTQTPLSLSVTPGQPASISCKSSQSLLRNDGKTPLYWYLQKAGQPPQL |
| | | LIYEVSNRFSGVPDRFSGSGSGTDFTLKISRVEAEDVGAYYCMQNIQFPSF |
| | | GGGTKLEIKTTTPAPRPPTPAPTIASQPLSLRPEACRPAAGGAVHTRGLDF |
| | | ACDIYIWAPLAGTCGVLLLSLVITLYCKRGRKKLLYIFKQPFMRPVQTTQE |
| | | EDGCSCRFPEEEEGGCELRVKESRSADAPAYKQGQNQLYNELNLGRREEYD |
| | | VLDKRRGRDPEMGGKPRRKNPQEGLYNELQKDKMAEAYSEIGMKGERRRGK |
| | | GHDGLYQGLSTATKDTYDALHMQALPPR |
| 139111-nt | 866 | ATGGCCCTCCCTGTCACCGCCCTGCTGCTTCCGCTGGCTCTTCTGCTCCAC |
| Full CAR | | GCCGCTCGGCCCGAAGTGCAATTGTTGGAATCTGGAGGAGGACTTGTGCAG |
| | | CCTGGAGGATCACTGAGACTTTCGTGTGCGGTGTCAGGCTTCGCCCTGAGC |
| | | AACCACGGCATGAGCTGGGTGCGGAGAGCCCCGGGGAAGGGTCTGGAATGG |
| | | GTGTCCGGGATCGTCTACTCCGGTTCAACTTACTACGCCGCAAGCGTGAAG |
| | | GGTCGCTTCACCATTTCCCGCGATAACTCCCGGAACACCCTGTACCTCCAA |
| | | ATGAACTCCCTGCGGCCCGAGGACACCGCCATCTACTACTGTTCCGCGCAT |
| | | GGAGGAGAGTCCGATGTCTGGGGACAGGGCACTACCGTGACCGTGTCGAGC |
| | | GCCTCGGGGGGAGGAGGCTCCGGCGGTCGCGCCTCCGGGGGGGGTGGCAGC |
| | | GACATTGTGATGACGCAGACTCCACTCTCGCTGTCCGTGACCCCGGGACAG |
| | | CCCGCGTCCATCTCGTGCAAGAGCTCCCAGAGCCTGCTGAGGAACGACGGA |
| | | AAGACTCCTCTGTATTGGTACCTCCAGAAGGCTGGACAGCCCCCGCAACTG |
| | | CTCATCTACGAAGTGTCAAATCGCTTCTCCGGGGTGCCGGATCGGTTTTCC |
| | | GGCTCGGGATCGGGCACCGACTTCACCCTGAAAATCTCCAGGGTCGAGGCC |
| | | GAGGACGTGGGAGCCTACTACTGCATGCAAAACATCCAGTTCCCTTCCTTC |
| | | GGCGGCGGCACAAAGCTGGAGATTAAGACCACTACCCCAGCACCGAGGCCA |
| | | CCCACCCCGGCTCCTACCATCGCCTCCCAGCCTCTGTCCCTGCGTCCGGAG |
| | | GCATGTAGACCCGCAGCTGGTGGGGCCGTGCATACCCGGGGTCTTGACTTC |
| | | GCCTGCGATATCTACATTTGGGCCCCTCTGGCTGGTACTTGCGGGGTCCTG |
| | | CTGCTTTCACTCGTGATCACTCTTTACTGTAAGCGCGGTCGGAAGAAGCTG |
| | | CTGTACATCTTTAAGCAACCCTTCATGAGGCCTGTGCAGACTACTCAAGAG |
| | | GAGGACGGCTGTTCATGCCGGTTCCCAGAGGAGGAGGAAGGCGGCTGCGAA |
| | | CTGCGCGTGAAATTCAGCCGCAGCGCAGATGCTCCAGCCTACAAGCAGGGG |
| | | CAGAACCAGCTCTACAACGAACTCAATCTTGGTCGGAGAGAGGAGTACGAC |
| | | GTGCTGGACAAGCGGAGAGGACGGGACCCAGAAATGGGCGGGAAGCCGCGC |
| | | AGAAAGAATCCCCAAGAGGGCCTGTACAACGAGCTCCAAAAGGATAAGATG |
| | | GCAGAAGCCTATAGCGAGATTGGTATGAAAGGGGAACGCAGAAGAGGCAAA |
| | | GGCCACGACGGACTGTACCAGGGACTCAGCACCGCCACCAAGGACACCTAT |
| | | GACGCTCTTCACATGCAGGCCCTGCCGCCTCGG |

139100

| | | |
|---|---|---|
| 139100-aa | 852 | MALPVTALLLPLALLLHAARPQVQLVQSGAEVRKTGASVKVSCKASGYIFD |
| Full CAR | | NFGINWVRQAPGQGLEWMGWINPKNNNTNYAQKFQGRVTITADESTNTAYM |
| | | EVSSLRSEDTAVYYCARGPYYYQSYMDVWGQGTMVTVSSASGGGGSGGRAS |
| | | GGGGSDIVMTQTPLSLPVTPGEPASISCRSSQSLLHSNGYNYLNWYLQKPG |
| | | QSPQLLIYLGSKRASGVPDRFSGSGSGTDFTLHITRVGAEDVGVYYCMQAL |
| | | QTPYTFGQGTKLEIKTTTPAPRPPTPAPTIASQPLSLRPEACRPAAGGAVH |
| | | TRGLDFACDIYIWAPLAGTCGVLLLSLVITLYCKRGRKKLLYIFKQPFMRP |
| | | VQTTQEEDGCSCRFPEEEEGGCELRVKFSRSADAPAYKQGQNQLYNELNLG |
| | | RREEYDVLDKRRGRDPEMGGKPRRKNPQEGLYNELQKDKMAEAYSEIGMKG |
| | | ERRRGKGHDGLYQGLSTATKDTYDALHMQALPPR |
| 139100-nt | 867 | ATGGCCCTCCCTGTCACCGCCCTGCTGCTTCCGCTGGCTCTTCTGCTCCAC |
| Full CAR | | GCCGCTCGGCCCCAAGTCCAACTCGTCCAGTCCGGCGCAGAAGTCAGAAAA |
| | | ACCGGTGCTAGCGTGAAAGTGTCCTGCAAGGCCTCCGGCTACATTTTCGAT |
| | | AACTTCGGAATCAACTGGGTCAGACAGGCCCCGGGCCAGGGGCTGGAATGG |
| | | ATGGGATGGATCAACCCCAAGAACAACAACACCAACTACGCACAGAAGTTC |
| | | CAGGGCCGCGTGACTATCACCGCCGATGAATCGACCAATACCGCCTACATG |
| | | GAGGTGTCCTCCCTGCGGTCGGAGGACACTGCCGTGTATTACTGCGCGAGG |
| | | GGCCCATACTACTACCAAAGCTACATGGACGTCTGGGGACAGGGAACCATG |
| | | GTGACCGTGTCATCCGCCTCCGGTGGTGGAGGCTCCGGGGGGCGGGCTTCA |
| | | GGAGGCGGAGGAAGCGATATTGTGATGACCCAGACTCCGCTTAGCCTGCCC |
| | | GTGACTCCTGGAGAACCGGCCTCCATTTCCTGCCGGTCCTCGCAATCACTC |
| | | CTGCATTCCAACGGTTACAACTACCTGAATTGGTACCTCCAGAAGCCTGGC |
| | | CAGTCGCCCCAGTTGCTGATCTATCTGGGCTCGAAGCGCGCCTCCGGGGTG |
| | | CCTGACCGGTTTAGCGGATCTGGGAGCGGCACGGACTTCACTCTCCACATC |
| | | ACCCGCGTGGGAGCGGAGGACGTGGGAGTGTACTACTGTATGCAGGCGCTG |
| | | CAGACTCCGTACACATTCGGACAGGGCACCAAGCTGGAGATCAAGACCACT |
| | | ACCCCAGCACCGAGGCCACCCACCCCGGCTCCTACCATCGCCTCCCAGCCT |
| | | CTGTCCCTGCGTCCGGAGGCATGTAGACCCGCAGCTGGTGGGGCCGTGCAT |
| | | ACCCGGGGTCTTGACTTCGCCTGCGATATCTACATTTGGGCCCCTCTGGCT |
| | | GGTACTTGCGGGGTCCTGCTGCTTTCACTCGTGATCACTCTTTACTGTAAG |
| | | CGCGGTCGGAAGAAGCTGCTGTACATCTTTAAGCAACCCTTCATGAGGCCT |
| | | GTGCAGACTACTCAAGAGGAGGACGGCTGTTCATGCCGGTTCCCAGAGGAG |
| | | GAGGAAGGCGGCTGCGAACTGCGCGTGAAATTCAGCCGCAGCGCAGATGCT |
| | | CCAGCCTACAAGCAGGGGCAGAACCAGCTCTACAACGAACTCAATCTTGGT |
| | | CGGAGAGAGGAGTACGACGTGCTGGACAAGCGGAGAGGACGGGACCCAGAA |
| | | ATGGGCGGGAAGCCGCGCAGAAAGAATCCCCAAGAGGGCCTGTACAACGAG |
| | | CTCCAAAAGGATAAGATGGCAGAAGCCTATAGCGAGATTGGTATGAAAGGG |
| | | GAACGCAGAAGAGGCAAAGGCCACGACGGACTGTACCAGGGACTCAGCACC |
| | | GCCACCAAGGACACCTATGACGCTCTTCACATGCAGGCCCTGCCGCCTCGG |

139101

| | | |
|---|---|---|
| 139101-aa | 853 | MALPVTALLLPLALLLHAARPQVQLQESGGGLVQPGGSLRLSCAASGFTFS |
| Full CAR | | SDAMTWVRQAPGKGLEWVSVISGSGGTTYYADSVKGRFTISRDNSKNTLYL |
| | | QMNSLRAEDTAVYYCAKLDSSGYYYARGPRYWGQGTLVTVSSASGGGGSGG |
| | | RASGGGGSDIQLTQSPSSLSASVGDRVTITCRASQSISSYLNWYQQKPGKA |
| | | PKLLIYGASTLASGVPARFSGSGSGTHFTLTINSLQSEDSATYYCQQSYKR |
| | | ASFGQGTKVEIKTTTPAPRPPTPAPTIASQPLSLRPEACRPAAGGAVHTRG |
| | | LDFACDIYIWAPLAGTCGVLLLSLVITLYCKRGRKKLLYIFKQPEMRPVQT |
| | | TQEEDGCSCRFPEEEEGGCELRVKESRSADAPAYKQGQNQLYNELNLGRRE |
| | | EYDVLDKRRGRDPEMGGKPRRKNPQEGLYNELQKDKMAEAYSEIGMKGERR |
| | | RGKGHDGLYQGLSTATKDTYDALHMQALPPR |
| 139101-nt | 868 | ATGGCCCTCCCTGTCACCGCCCTGCTGCTTCCGCTGGCTCTTCTGCTCCAC |
| Full CAR | | GCCGCTCGGCCCCAAGTGCAACTTCAAGAATCAGGCGGAGGACTCGTGCAG |
| | | CCCGGAGGATCATTGCGGCTCTCGTGCGCCGCCTCGGGCTTCACCTTCTCG |
| | | AGCGACGCCATGACCTGGGTCCGCCAGGCCCCGGGGAAGGGGCTGGAATGG |
| | | GTGTCTGTGATTTCCGGCTCCGGGGGAACTACGTACTACGCCGATTCCGTG |
| | | AAAGGTCGCTTCACTATCTCCCGGGACAACAGCAAGAACACCCTTTATCTG |
| | | CAAATGAATTCCCTCCGCGCCGAGGACACCGCCGTGTACTACTGCGCCAAG |
| | | CTGGACTCCTCGGGCTACTACTATGCCCGGGGTCCGAGATACTGGGGACAG |
| | | GGAACCCTCGTGACCGTGTCCTCCGCGTCCGGCGGAGGAGGGTCGGGAGGG |
| | | CGGGCCTCCGGCGGCGGCGGTTCGGACATCCAGCTGACCCAGTCCCCATCC |
| | | TCACTGAGCGCAAGCGTGGGCGACAGAGTCACCATTACATGCAGGGCGTCC |
| | | CAGAGCATCAGCTCCTACCTGAACTGGTACCAACAGAAGCCTGGAAAGGCT |
| | | CCTAAGCTGTTGATCTACGGGGCTTCGACCCTGGCATCCGGGGTGCCCGCG |
| | | AGGTTTAGCGGAAGCGGTAGCGGCACTCACTTCACTCTGACCATTAACAGC |
| | | CTCCAGTCCGAGGATTCAGCCACTTACTACTGTCAGCAGTCCTACAAGCGG |
| | | GCCAGCTTCGGACAGGGCACTAAGGTCGAGATCAAGACCACTACCCCAGCA |
| | | CCGAGGCCACCCACCCCGGCTCCTACCATCGCCTCCCAGCCTCTGTCCCTG |
| | | CGTCCGGAGGCATGTAGACCCGCAGCTGGTGGGGCCGTGCATACCCGGGGT |
| | | CTTGACTTCGCCTGCGATATCTACATTTGGGCCCCTCTGGCTGGTACTTGC |
| | | GGGGTCCTGCTGCTTTCACTCGTGATCACTCTTTACTGTAAGCGCGGTCGG |
| | | AAGAAGCTGCTGTACATCTTTAAGCAACCCTTCATGAGGCCTGTGCAGACT |
| | | ACTCAAGAGGAGGACGGCTGTTCATGCCGGTTCCCAGAGGAGGAGGAAGGC |
| | | GGCTGCGAACTGCGCGTGAAATTCAGCCGCAGCGCAGATGCTCCAGCCTAC |
| | | AAGCAGGGGCAGAACCAGCTCTACAACGAACTCAATCTTGGTCGGAGAGAG |
| | | GAGTACGACGTGCTGGACAAGCGGAGAGGACGGGACCCAGAAATGGGCGGG |
| | | AAGCCGCGCAGAAAGAATCCCCAAGAGGGCCTGTACAACGAGCTCCAAAAG |
| | | GATAAGATGGCAGAAGCCTATAGCGAGATTGGTATGAAAGGGGAACGCAGA |
| | | AGAGGCAAAGGCCACGACGGACTGTACCAGGGACTCAGCACCGCCACCAAG |
| | | GACACCTATGACGCTCTTCACATGCAGGCCCTGCCGCCTCGG |

139102

| | | |
|---|---|---|
| 139102-aa | 854 | MALPVTALLLPLALLLHAARPQVQLVQSGAEVKKPGASVKVSCKASGYTFS |
| Full CAR | | NYGITWVRQAPGQGLEWMGWISAYNGNTNYAQKFQGRVTMTRNTSISTAYM |
| | | ELSSLRSEDTAVYYCARGPYYYYMDVWGKGTMVTVSSASGGGGSGGRASGG |
| | | GGSEIVMTQSPLSLPVTPGEPASISCRSSQSLLYSNGYNYVDWYLQKPGQS |
| | | PQLLIYLGSNRASGVPDRFSGSGSGTDFKLQISRVEAEDVGIYYCMQGRQF |
| | | PYSFGQGTKVEIKTTTPAPRPPTPAPTIASQPLSLRPEACRPAAGGAVHTR |
| | | GLDFACDIYIWAPLAGTCGVLLLSLVITLYCKRGRKKLLYIFKQPEMRPVQ |
| | | TTQEEDGCSCRFPEEEEGGCELRVKESRSADAPAYKQGQNQLYNELNLGRR |
| | | EEYDVLDKRRGRDPEMGGKPRRKNPQEGLYNELQKDKMAEAYSEIGMKGER |
| | | RRGKGHDGLYQGLSTATKDTYDALHMQALPPR |
| 139102-nt | 869 | ATGGCCCTCCCTGTCACCGCCCTGCTGCTTCCGCTGGCTCTTCTGCTCCAC |
| Full CAR | | GCCGCTCGGCCCCAAGTCCAACTGGTCCAGAGCGGTGCAGAAGTGAAGAAG |
| | | CCCGGAGCGAGCGTGAAAGTGTCCTGCAAGGCTTCCGGGTACACCTTCTCC |
| | | AACTACGGCATCACTTGGGTGCGCCAGGCCCCGGGACAGGGCCTGGAATGG |
| | | ATGGGGTGGATTTCCGCGTACAACGGCAATACGAACTACGCTCAGAAGTTC |
| | | CAGGGTAGAGTGACCATGACTAGGAACACCTCCATTTCCACCGCCTACATG |
| | | GAACTGTCCTCCCTGCGGAGCGAGGACACCGCCGTGTACTATTGCGCCCGG |
| | | GGACCATACTACTACTACATGGATGTCTGGGGGAAGGGGACTATGGTCACC |
| | | GTGTCATCCGCCTCGGGAGGCGGCGGATCAGGAGGACGCGCCTCTGGTGGT |
| | | GGAGGATCGGAGATCGTGATGACCCAGAGCCCTCTCTCCTTGCCCGTGACT |
| | | CCTGGGGAGCCCGCATCCATTTCATGCCGGAGCTCCCAGTCACTTCTCTAC |
| | | TCCAACGGCTATAACTACGTGGATTGGTACCTCCAAAAGCCGGGCCAGAGC |
| | | CCGCAGCTGCTGATCTACCTGGGCTCGAACAGGGCCAGCGGAGTGCCTGAC |
| | | CGGTTCTCCGGGTCGGGAAGCGGGACCGACTTCAAGCTGCAAATCTCGAGA |
| | | GTGGAGGCCGAGGACGTGGGAATCTACTACTGTATGCAGGGCCGCCAGTTT |
| | | CCGTACTCGTTCGGACAGGGCACCAAAGTGGAAATCAAGACCACTACCCCA |
| | | GCACCGAGGCCACCCACCCCGGCTCCTACCATCGCCTCCCAGCCTCTGTCC |
| | | CTGCGTCCGGAGGCATGTAGACCCGCAGCTGGTGGGGCCGTGCATACCCGG |
| | | GGTCTTGACTTCGCCTGCGATATCTACATTTGGGCCCCTCTGGCTGGTACT |
| | | TGCGGGGTCCTGCTGCTTTCACTCGTGATCACTCTTTACTGTAAGCGCGGT |
| | | CGGAAGAAGCTGCTGTACATCTTTAAGCAACCCTTCATGAGGCCTGTGCAG |
| | | ACTACTCAAGAGGAGGACGGCTGTTCATGCCGGTTCCCAGAGGAGGAGGAA |
| | | GGCGGCTGCGAACTGCGCGTGAAATTCAGCCGCAGCGCAGATGCTCCAGCC |
| | | TACAAGCAGGGGCAGAACCAGCTCTACAACGAACTCAATCTTGGTCGGAGA |
| | | GAGGAGTACGACGTGCTGGACAAGCGGAGAGGACGGGACCCAGAAATGGGC |
| | | GGGAAGCCGCGCAGAAAGAATCCCCAAGAGGGCCTGTACAACGAGCTCCAA |
| | | AAGGATAAGATGGCAGAAGCCTATAGCGAGATTGGTATGAAAGGGGAACGC |
| | | AGAAGAGGCAAAGGCCACGACGGACTGTACCAGGGACTCAGCACCGCCACC |
| | | AAGGACACCTATGACGCTCTTCACATGCAGGCCCTGCCGCCTCGG |

139104

| | | |
|---|---|---|
| 139104-aa | 855 | MALPVTALLLPLALLLHAARPEVQLLETGGGLVQPGGSLRLSCAVSGFALS |
| Full CAR | 870 | NHGMSWVRRAPGKGLEWVSGIVYSGSTYYAASVKGRFTISRDNSRNTLYLQ |
| | | MNSLRPEDTAIYYCSAHGGESDVWGQGTTVTVSSASGGGGSGGRASGGGGS |
| | | EIVLTQSPATLSVSPGESATLSCRASQSVSSNLAWYQQKPGQAPRLLIYGA |
| | | STRASGIPDRFSGSGSGTDFTLTISSLQAEDVAVYYCQQYGSSLTFGGGTK |
| | | VEIKTTTPAPRPPTPAPTIASQPLSLRPEACRPAAGGAVHTRGLDFACDIY |
| | | IWAPLAGTCGVLLLSLVITLYCKRGRKKLLYIFKQPFMRPVQTTQEEDGCS |
| | | CRFPEEEEGGCELRVKESRSADAPAYKQGQNQLYNELNLGRREEYDVLDKR |
| | | RGRDPEMGGKPRRKNPQEGLYNELQKDKMAEAYSEIGMKGERRRGKGHDGL |
| | | YQGLSTATKDTYDALHMQALPPR |
| 139104-nt | | ATGGCCCTCCCTGTCACCGCCCTGCTGCTTCCGCTGGCTCTTCTGCTCCAC |
| Full CAR | | GCCGCTCGGCCCGAAGTGCAATTGCTCGAAACTGGAGGAGGTCTGGTGCAA |
| | | CCTGGAGGATCACTTCGCCTGTCCTGCGCCGTGTCGGGCTTTGCCCTGTCC |
| | | AACCATGGAATGAGCTGGGTCCGCCGCGCGCCGGGGAAGGGCCTCGAATGG |
| | | GTGTCCGGCATCGTCTACTCCGGCTCCACCTACTACGCCGCGTCCGTGAAG |
| | | GGCCGGTTCACGATTTCACGGGACAACTCGCGGAACACCCTGTACCTCCAA |
| | | ATGAATTCCCTTCGGCCGGAGGATACTGCCATCTACTACTGCTCCGCCCAC |
| | | GGTGGCGAATCCGACGTCTGGGGCCAGGGAACCACCGTGACCGTGTCCAGC |
| | | GCGTCCGGGGGAGGAGGAAGCGGGGGTAGAGCATCGGGTGGAGGCGGATCA |
| | | GAGATCGTGCTGACCCAGTCCCCCGCCACCTTGAGCGTGTCACCAGGAGAG |
| | | TCCGCCACCCTGTCATGCCGCGCCAGCCAGTCCGTGTCCTCCAACCTGGCT |
| | | TGGTACCAGCAGAAGCCGGGGCAGGCCCCTAGACTCCTGATCTATGGGGCG |
| | | TCGACCCGGGCATCTGGAATTCCCGATAGGTTCAGCGGATCGGGCTCGGGC |
| | | ACTGACTTCACTCTGACCATCTCCTCGCTGCAAGCCGAGGACGTGGCTGTG |
| | | TACTACTGTCAGCAGTACGGAAGCTCCCTGACTTTCGGTGGCGGGACCAAA |
| | | GTCGAGATTAAGACCACTACCCCAGCACCGAGGCCACCCACCCCGGCTCCT |
| | | ACCATCGCCTCCCAGCCTCTGTCCCTGCGTCCGGAGGCATGTAGACCCGCA |
| | | GCTGGTGGGGCCGTGCATACCCGGGGTCTTGACTTCGCCTGCGATATCTAC |
| | | ATTTGGGCCCCTCTGGCTGGTACTTGCGGGGTCCTGCTGCTTTCACTCGTG |
| | | ATCACTCTTTACTGTAAGCGCGGTCGGAAGAAGCTGCTGTACATCTTTAAG |
| | | CAACCCTTCATGAGGCCTGTGCAGACTACTCAAGAGGAGGACGGCTGTTCA |
| | | TGCCGGTTCCCAGAGGAGGAGGAAGGCGGCTGCGAACTGCGCGTGAAATTC |
| | | AGCCGCAGCGCAGATGCTCCAGCCTACAAGCAGGGGCAGAACCAGCTCTAC |
| | | AACGAACTCAATCTTGGTCGGAGAGAGGAGTACGACGTGCTGGACAAGCGG |
| | | AGAGGACGGGACCCAGAAATGGGCGGGAAGCCGCGCAGAAAGAATCCCCAA |
| | | GAGGGCCTGTACAACGAGCTCCAAAAGGATAAGATGGCAGAAGCCTATAGC |
| | | GAGATTGGTATGAAAGGGGAACGCAGAAGAGGCAAAGGCCACGACGGACTG |
| | | TACCAGGGACTCAGCACCGCCACCAAGGACACCTATGACGCTCTTCACATG |
| | | CAGGCCCTGCCGCCTCGG |

139106

| | | |
|---|---|---|
| 139106-aa | 856 | MALPVTALLLPLALLLHAARPEVQLVETGGGLVQPGGSLRLSCAVSGFALS |
| Full CAR | | NHGMSWVRRAPGKGLEWVSGIVYSGSTYYAASVKGRFTISRDNSRNTLYLQ |
| | | MNSLRPEDTAIYYCSAHGGESDVWGQGTTVTVSSASGGGGSGGRASGGGGS |
| | | EIVMTQSPATLSVSPGERATLSCRASQSVSSKLAWYQQKPGQAPRLLMYGA |
| | | SIRATGIPDRFSGSGSGTEFTLTISSLEPEDFAVYYCQQYGSSSWTFGQGT |
| | | KVEIKTTTPAPRPPTPAPTIASQPLSLRPEACRPAAGGAVHTRGLDFACDI |
| | | YIWAPLAGTCGVLLLSLVITLYCKRGRKKLLYIFKQPFMRPVQTTQEEDGC |
| | | SCRFPEEEEGGCELRVKESRSADAPAYKQGQNQLYNELNLGRREEYDVLDK |
| | | RRGRDPEMGGKPRRKNPQEGLYNELQKDKMAEAYSEIGMKGERRRGKGHDG |
| | | LYQGLSTATKDTYDALHMQALPPR |
| 139106-nt | 871 | ATGGCCCTCCCTGTCACCGCCCTGCTGCTTCCGCTGGCTCTTCTGCTCCAC |
| Full CAR | | GCCGCTCGGCCCGAAGTGCAATTGGTGGAAACTGGAGGAGGACTTGTGCAA |
| | | CCTGGAGGATCATTGAGACTGAGCTGCGCAGTGTCGGGATTCGCCCTGAGC |
| | | AACCATGGAATGTCCTGGGTCAGAAGGGCCCCTGGAAAAGGCCTCGAATGG |
| | | GTGTCAGGGATCGTGTACTCCGGTTCCACTTACTACGCCGCCTCCGTGAAG |
| | | GGGCGCTTCACTATCTCACGGGATAACTCCCGCAATACCCTGTACCTCCAA |
| | | ATGAACAGCCTGCGGCCGGAGGATACCGCCATCTACTACTGTTCCGCCCAC |
| | | GGTGGAGAGTCTGACGTCTGGGGCCAGGGAACTACCGTGACCGTGTCCTCC |
| | | GCGTCCGGCGGTGGAGGGAGCGGCGGCCGCGCCAGCGGCGGCGGAGGCTCC |
| | | GAGATCGTGATGACCCAGAGCCCCGCTACTCTGTCGGTGTCGCCCGGAGAA |
| | | AGGGCGACCCTGTCCTGCCGGGCGTCGCAGTCCGTGAGCAGCAAGCTGGCT |
| | | TGGTACCAGCAGAAGCCGGGCCAGGCACCACGCCTGCTTATGTACGGTGCC |
| | | TCCATTCGGGCCACCGGAATCCCGGACCGGTTCTCGGGGTCGGGGTCCGGT |
| | | ACCGAGTTCACACTGACCATTTCCTCGCTCGAGCCCGAGGACTTTGCCGTC |
| | | TATTACTGCCAGCAGTACGGCTCCTCCTCATGGACGTTCGGCCAGGGGACC |
| | | AAGGTCGAAATCAAGACCACTACCCCAGCACCGAGGCCACCCACCCCGGCT |
| | | CCTACCATCGCCTCCCAGCCTCTGTCCCTGCGTCCGGAGGCATGTAGACCC |
| | | GCAGCTGGTGGGGCCGTGCATACCCGGGGTCTTGACTTCGCCTGCGATATC |
| | | TACATTTGGGCCCCTCTGGCTGGTACTTGCGGGGTCCTGCTGCTTTCACTC |
| | | GTGATCACTCTTTACTGTAAGCGCGGTCGGAAGAAGCTGCTGTACATCTTT |
| | | AAGCAACCCTTCATGAGGCCTGTGCAGACTACTCAAGAGGAGGACGGCTGT |
| | | TCATGCCGGTTCCCAGAGGAGGAGGAAGGCGGCTGCGAACTGCGCGTGAAA |
| | | TTCAGCCGCAGCGCAGATGCTCCAGCCTACAAGCAGGGGCAGAACCAGCTC |
| | | TACAACGAACTCAATCTTGGTCGGAGAGAGGAGTACGACGTGCTGGACAAG |
| | | CGGAGAGGACGGGACCCAGAAATGGGCGGGAAGCCGCGCAGAAAGAATCCC |
| | | CAAGAGGGCCTGTACAACGAGCTCCAAAAGGATAAGATGGCAGAAGCCTAT |
| | | AGCGAGATTGGTATGAAAGGGGAACGCAGAAGAGGCAAAGGCCACGACGGA |
| | | CTGTACCAGGGACTCAGCACCGCCACCAAGGACACCTATGACGCTCTTCAC |
| | | ATGCAGGCCCTGCCGCCTCGG |

139107

| | | |
|---|---|---|
| 139107-aa | 857 | MALPVTALLLPLALLLHAARPEVQLVETGGGVVQPGGSLRLSCAVSGFALS |
| Full CAR | | NHGMSWVRRAPGKGLEWVSGIVYSGSTYYAASVKGRFTISRDNSRNTLYLQ |
| | | MNSLRPEDTAIYYCSAHGGESDVWGQGTTVTVSSASGGGGSGGRASGGGGS |
| | | EIVLTQSPGTLSLSPGERATLSCRASQSVGSTNLAWYQQKPGQAPRLLIYD |
| | | ASNRATGIPDRFSGGGSGTDFTLTISRLEPEDFAVYYCQQYGSSPPWTFGQ |
| | | GTKVEIKTTTPAPRPPTPAPTIASQPLSLRPEACRPAAGGAVHTRGLDFAC |
| | | DIYIWAPLAGTCGVLLLSLVITLYCKRGRKKLLYIFKQPFMRPVQTTQEED |
| | | GCSCRFPEEEEGGCELRVKFSRSADAPAYKQGQNQLYNELNLGRREEYDVL |
| | | DKRRGRDPEMGGKPRRKNPQEGLYNELQKDKMAEAYSEIGMKGERRRGKGH |
| | | DGLYQGLSTATKDTYDALHMQALPPR |
| 139107-nt | 872 | ATGGCCCTCCCTGTCACCGCCCTGCTGCTTCCGCTGGCTCTTCTGCTCCAC |
| Full CAR | | GCCGCTCGGCCCGAAGTGCAATTGGTGGAGACTGGAGGAGGAGTGGTGCAA |
| | | CCTGGAGGAAGCCTGAGACTGTCATGCGCGGTGTCGGGCTTCGCCCTCTCC |
| | | AACCACGGAATGTCCTGGGTCCGCCGGGCCCCTGGGAAAGGACTTGAATGG |
| | | GTGTCCGGCATCGTGTACTCGGGTTCCACCTACTACGCGGCCTCAGTGAAG |
| | | GGCCGGTTTACTATTAGCCGCGACAACTCCAGAAACACACTGTACCTCCAA |
| | | ATGAACTCGCTGCGGCCGGAAGATACCGCTATCTACTACTGCTCCGCCCAT |
| | | GGGGGAGAGTCGGACGTCTGGGGACAGGGCACCACTGTCACTGTGTCCAGC |
| | | GCTTCCGGCGGTGGTGGAAGCGGGGGACGGGCCTCAGGAGGCGGTGGCAGC |
| | | GAGATTGTGCTGACCCAGTCCCCCGGGACCCTGAGCCTGTCCCCGGGAGAA |
| | | AGGGCCACCCTCTCCTGTCGGGCATCCCAGTCCGTGGGGTCTACTAACCTT |
| | | GCATGGTACCAGCAGAAGCCCGGCCAGGCCCCTCGCCTGCTGATCTACGAC |
| | | GCGTCCAATAGAGCCACCGGCATCCCGGATCGCTTCAGCGGAGGCGGATCG |
| | | GGCACCGACTTCACCCTCACCATTTCAAGGCTGGAACCGGAGGACTTCGCC |
| | | GTGTACTACTGCCAGCAGTATGGTTCGTCCCCACCCTGGACGTTCGGCCAG |
| | | GGGACTAAGGTCGAGATCAAGACCACTACCCCAGCACCGAGGCCACCCACC |
| | | CCGGCTCCTACCATCGCCTCCCAGCCTCTGTCCCTGCGTCCGGAGGCATGT |
| | | AGACCCGCAGCTGGTGGGGCCGTGCATACCCGGGGTCTTGACTTCGCCTGC |
| | | GATATCTACATTTGGGCCCCTCTGGCTGGTACTTGCGGGGTCCTGCTGCTT |
| | | TCACTCGTGATCACTCTTTACTGTAAGCGCGGTCGGAAGAAGCTGCTGTAC |
| | | ATCTTTAAGCAACCCTTCATGAGGCCTGTGCAGACTACTCAAGAGGAGGAC |
| | | GGCTGTTCATGCCGGTTCCCAGAGGAGGAGGAAGGCGGCTGCGAACTGCGC |
| | | GTGAAATTCAGCCGCAGCGCAGATGCTCCAGCCTACAAGCAGGGGCAGAAC |
| | | CAGCTCTACAACGAACTCAATCTTGGTCGGAGAGAGGAGTACGACGTGCTG |
| | | GACAAGCGGAGAGGACGGGACCCAGAAATGGGCGGGAAGCCGCGCAGAAAG |
| | | AATCCCCAAGAGGGCCTGTACAACGAGCTCCAAAAGGATAAGATGGCAGAA |
| | | GCCTATAGCGAGATTGGTATGAAAGGGGAACGCAGAAGAGGCAAAGGCCAC |
| | | GACGGACTGTACCAGGGACTCAGCACCGCCACCAAGGACACCTATGACGCT |
| | | CTTCACATGCAGGCCCTGCCGCCTCGG |

139108

| | | |
|---|---|---|
| 139108-aa | 858 | MALPVTALLLPLALLLHAARPQVQLVESGGGLVKPGGSLRLSCAASGFTFS |
| Full CAR | | DYYMSWIRQAPGKGLEWVSYISSSGSTIYYADSVKGRFTISRDNAKNSLYL |
| | | QMNSLRAEDTAVYYCARESGDGMDVWGQGTTVTVSSASGGGGSGGRASGGG |
| | | GSDIQMTQSPSSLSASVGDRVTITCRASQSISSYLNWYQQKPGKAPKLLIY |
| | | AASSLQSGVPSRESGSGSGTDFTLTISSLQPEDFATYYCQQSYTLAFGQGT |
| | | KVDIKTTTPAPRPPTPAPTIASQPLSLRPEACRPAAGGAVHTRGLDFACDI |
| | | YIWAPLAGTCGVLLLSLVITLYCKRGRKKLLYIFKQPFMRPVQTTQEEDGC |
| | | SCRFPEEEEGGCELRVKFSRSADAPAYKQGQNQLYNELNLGRREEYDVLDK |
| | | RRGRDPEMGGKPRRKNPQEGLYNELQKDKMAEAYSEIGMKGERRRGKGHDG |
| | | LYQGLSTATKDTYDALHMQALPPR |
| 139108-nt | 873 | ATGGCCCTCCCTGTCACCGCCCTGCTGCTTCCGCTGGCTCTTCTGCTCCAC |
| Full CAR | | GCCGCTCGGCCCCAAGTGCAACTCGTGGAATCTGGTGGAGGACTCGTGAAA |
| | | CCTGGAGGATCATTGAGACTGTCATGCGCGGCCTCGGGATTCACGTTCTCC |
| | | GATTACTACATGAGCTGGATTCGCCAGGCTCCGGGGAAGGGACTGGAATGG |
| | | GTGTCCTACATTTCCTCATCCGGCTCCACCATCTACTACGCGGACTCCGTG |
| | | AAGGGGAGATTCACCATTAGCCGCGATAACGCCAAGAACAGCCTGTACCTT |
| | | CAGATGAACTCCCTGCGGGCTGAAGATACTGCCGTCTACTACTGCGCAAGG |
| | | GAGAGCGGAGATGGGATGGACGTCTGGGGACAGGGTACCACTGTGACCGTG |
| | | TCGTCGGCCTCCGGCGGAGGGGGTTCGGGTGGAAGGGCCAGCGGCGGCGGA |
| | | GGCAGCGACATCCAGATGACCCAGTCCCCCTCATCGCTGTCCGCCTCCGTG |
| | | GGCGACCGCGTCACCATCACATGCCGGGCCTCACAGTCGATCTCCTCCTAC |
| | | CTCAATTGGTATCAGCAGAAGCCCGGAAAGGCCCCTAAGCTTCTGATCTAC |
| | | GCAGCGTCCTCCCTGCAATCCGGGGTCCCATCTCGGTTCTCCGGCTCGGGC |
| | | AGCGGTACCGACTTCACTCTGACCATCTCGAGCCTGCAGCCGGAGGACTTC |
| | | GCCACTTACTACTGTCAGCAAAGCTACACCCTCGCGTTTGGCCAGGGCACC |
| | | AAAGTGGACATCAAGACCACTACCCCAGCACCGAGGCCACCCACCCCGGCT |
| | | CCTACCATCGCCTCCCAGCCTCTGTCCCTGCGTCCGGAGGCATGTAGACCC |
| | | GCAGCTGGTGGGGCCGTGCATACCCGGGGTCTTGACTTCGCCTGCGATATC |
| | | TACATTTGGGCCCCTCTGGCTGGTACTTGCGGGGTCCTGCTGCTTTCACTC |
| | | GTGATCACTCTTTACTGTAAGCGCGGTCGGAAGAAGCTGCTGTACATCTTT |
| | | AAGCAACCCTTCATGAGGCCTGTGCAGACTACTCAAGAGGAGGACGGCTGT |
| | | TCATGCCGGTTCCCAGAGGAGGAGGAAGGCGGCTGCGAACTGCGCGTGAAA |
| | | TTCAGCCGCAGCGCAGATGCTCCAGCCTACAAGCAGGGGCAGAACCAGCTC |
| | | TACAACGAACTCAATCTTGGTCGGAGAGAGGAGTACGACGTGCTGGACAAG |
| | | CGGAGAGGACGGGACCCAGAAATGGGCGGGAAGCCGCGCAGAAAGAATCCC |
| | | CAAGAGGGCCTGTACAACGAGCTCCAAAAGGATAAGATGGCAGAAGCCTAT |
| | | AGCGAGATTGGTATGAAAGGGGAACGCAGAAGAGGCAAAGGCCACGACGGA |
| | | CTGTACCAGGGACTCAGCACCGCCACCAAGGACACCTATGACGCTCTTCAC |
| | | ATGCAGGCCCTGCCGCCTCGG |

139110

| | | |
|---|---|---|
| 139110-aa | 860 | MALPVTALLLPLALLLHAARPQVQLVQSGGGLVKPGGSLRLSCAASGFTFS |
| Full CAR | | DYYMSWIRQAPGKGLEWVSYISSSGNTIYYADSVKGRFTISRDNAKNSLYL |
| | | QMNSLRAEDTAVYYCARSTMVREDYWGQGTLVTVSSASGGGGSGGRASGGG |
| | | GSDIVLTQSPLSLPVTLGQPASISCKSSESLVHNSGKTYLNWFHQRPGQSP |
| | | RRLIYEVSNRDSGVPDRFTGSGSGTDFTLKISRVEAEDVGVYYCMQGTHWP |
| | | GTFGQGTKLEIKTTTPAPRPPTPAPTIASQPLSLRPEACRPAAGGAVHTRG |
| | | LDFACDIYIWAPLAGTCGVLLLSLVITLYCKRGRKKLLYIFKQPFMRPVQT |
| | | TQEEDGCSCRFPEEEEGGCELRVKESRSADAPAYKQGQNQLYNELNLGRRE |
| | | EYDVLDKRRGRDPEMGGKPRRKNPQEGLYNELQKDKMAEAYSEIGMKGERR |
| | | RGKGHDGLYQGLSTATKDTYDALHMQALPPR |
| 139110-nt | 875 | ATGGCCCTCCCTGTCACCGCCCTGCTGCTTCCGCTGGCTCTTCTGCTCCAC |
| Full CAR | | GCCGCTCGGCCCCAAGTGCAACTGGTGCAAAGCGGAGGAGGATTGGTCAAA |
| | | CCCGGAGGAAGCCTGAGACTGTCATGCGCGGCCTCTGGATTCACCTTCTCC |
| | | GATTACTACATGTCATGGATCAGACAGGCCCCGGGGAAGGGCCTCGAATGG |
| | | GTGTCCTACATCTCGTCCTCCGGGAACACCATCTACTACGCCGACAGCGTG |
| | | AAGGGCCGCTTTACCATTTCCCGCGACAACGCAAAGAACTCGCTGTACCTT |
| | | CAGATGAATTCCCTGCGGGCTGAAGATACCGCGGTGTACTATTGCGCCCGG |
| | | TCCACTATGGTCCGGGAGGACTACTGGGGACAGGGCACACTCGTGACCGTG |
| | | TCCAGCGCGAGCGGGGGTGGAGGCAGCGGTGGACGCGCCTCCGGCGGCGGC |
| | | GGTTCAGACATCGTGCTGACTCAGTCGCCCCTGTCGCTGCCGGTCACCCTG |
| | | GGCCAACCGGCCTCAATTAGCTGCAAGTCCTCGGAGAGCCTGGTGCACAAC |
| | | TCAGGAAAGACTTACCTGAACTGGTTCCATCAGCGGCCTGGACAGTCCCCA |
| | | CGGAGGCTCATCTATGAAGTGTCCAACAGGGATTCGGGGGTGCCCGACCGC |
| | | TTCACTGGCTCCGGGTCCGGCACCGACTTCACCTTGAAAATCTCCAGAGTG |
| | | GAAGCCGAGGACGTGGGCGTGTACTACTGTATGCAGGGTACCCACTGGCCT |
| | | GGAACCTTTGGACAAGGAACTAAGCTCGAGATTAAGACCACTACCCCAGCA |
| | | CCGAGGCCACCCACCCCGGCTCCTACCATCGCCTCCCAGCCTCTGTCCCTG |
| | | CGTCCGGAGGCATGTAGACCCGCAGCTGGTGGGGCCGTGCATACCCGGGGT |
| | | CTTGACTTCGCCTGCGATATCTACATTTGGGCCCCTCTGGCTGGTACTTGC |
| | | GGGGTCCTGCTGCTTTCACTCGTGATCACTCTTTACTGTAAGCGCGGTCGG |
| | | AAGAAGCTGCTGTACATCTTTAAGCAACCCTTCATGAGGCCTGTGCAGACT |
| | | ACTCAAGAGGAGGACGGCTGTTCATGCCGGTTCCCAGAGGAGGAGGAAGGC |
| | | GGCTGCGAACTGCGCGTGAAATTCAGCCGCAGCGCAGATGCTCCAGCCTAC |
| | | AAGCAGGGGCAGAACCAGCTCTACAACGAACTCAATCTTGGTCGGAGAGAG |
| | | GAGTACGACGTGCTGGACAAGCGGAGAGGACGGGACCCAGAAATGGGCGGG |
| | | AAGCCGCGCAGAAAGAATCCCCAAGAGGGCCTGTACAACGAGCTCCAAAAG |
| | | GATAAGATGGCAGAAGCCTATAGCGAGATTGGTATGAAAGGGGAACGCAGA |
| | | AGAGGCAAAGGCCACGACGGACTGTACCAGGGACTCAGCACCGCCACCAAG |
| | | GACACCTATGACGCTCTTCACATGCAGGCCCTGCCGCCTCGG |

139112

| | | |
|---|---|---|
| 139112-aa | 861 | MALPVTALLLPLALLLHAARPQVQLVESGGGLVQPGGSLRLSCAVSGFALS |
| Full CAR | | NHGMSWVRRAPGKGLEWVSGIVYSGSTYYAASVKGRFTISRDNSRNTLYLQ |
| | | MNSLRPEDTAIYYCSAHGGESDVWGQGTTVTVSSASGGGGSGGRASGGGGS |
| | | DIRLTQSPSPLSASVGDRVTITCQASEDINKELNWYHQTPGKAPKLLIYDA |
| | | STLQTGVPSRFSGSGSGTDFTLTINSLQPEDIGTYYCQQYESLPLTEGGGT |
| | | KVEIKTTTPAPRPPTPAPTIASQPLSLRPEACRPAAGGAVHTRGLDFACDI |
| | | YIWAPLAGTCGVLLLSLVITLYCKRGRKKLLYIFKQPFMRPVQTTQEEDGC |
| | | SCRFPEEEEGGCELRVKESRSADAPAYKQGQNQLYNELNLGRREEYDVLDK |
| | | RRGRDPEMGGKPRRKNPQEGLYNELQKDKMAEAYSEIGMKGERRRGKGHDG |
| | | LYQGLSTATKDTYDALHMQALPPR |
| 139112-nt | 876 | ATGGCCCTCCCTGTCACCGCCCTGCTGCTTCCGCTGGCTCTTCTGCTCCAC |
| Full CAR | | GCCGCTCGGCCCCAAGTGCAACTCGTGGAATCTGGTGGAGGACTCGTGCAA |
| | | CCCGGTGGAAGCCTTAGGCTGTCGTGCGCCGTCAGCGGGTTTGCTCTGAGC |
| | | AACCATGGAATGTCCTGGGTCCGCCGGGCACCGGGAAAAGGGCTGGAATGG |
| | | GTGTCCGGCATCGTGTACAGCGGGTCAACCTATTACGCCGCGTCCGTGAAG |
| | | GGCAGATTCACTATCTCAAGAGACAACAGCCGGAACACCCTGTACTTGCAA |
| | | ATGAATTCCCTGCGCCCCGAGGACACCGCCATCTACTACTGCTCCGCCCAC |
| | | GGAGGAGAGTCGGACGTGTGGGGCCAGGGAACGACTGTGACTGTGTCCAGC |
| | | GCATCAGGAGGGGGTGGTTCGGGCGGCCGGGCCTCGGGGGGAGGAGGTTCC |
| | | GACATTCGGCTGACCCAGTCCCCGTCCCCACTGTCGGCCTCCGTCGGCGAC |
| | | CGCGTGACCATCACTTGTCAGGCGTCCGAGGACATTAACAAGTTCCTGAAC |
| | | TGGTACCACCAGACCCCTGGAAAGGCCCCCAAGCTGCTGATCTACGATGCC |
| | | TCGACCCTTCAAACTGGAGTGCCTAGCCGGTTCTCCGGGTCCGGCTCCGGC |
| | | ACTGATTTCACTCTGACCATCAACTCATTGCAGCCGGAAGATATCGGGACC |
| | | TACTATTGCCAGCAGTACGAATCCCTCCCGCTCACATTCGGCGGGGGAACC |
| | | AAGGTCGAGATTAAGACCACTACCCCAGCACCGAGGCCACCCACCCCGGCT |
| | | CCTACCATCGCCTCCCAGCCTCTGTCCCTGCGTCCGGAGGCATGTAGACCC |
| | | GCAGCTGGTGGGGCCGTGCATACCCGGGGTCTTGACTTCGCCTGCGATATC |
| | | TACATTTGGGCCCCTCTGGCTGGTACTTGCGGGGTCCTGCTGCTTTCACTC |
| | | GTGATCACTCTTTACTGTAAGCGCGGTCGGAAGAAGCTGCTGTACATCTTT |
| | | AAGCAACCCTTCATGAGGCCTGTGCAGACTACTCAAGAGGAGGACGGCTGT |
| | | TCATGCCGGTTCCCAGAGGAGGAGGAAGGCGGCTGCGAACTGCGCGTGAAA |
| | | TTCAGCCGCAGCGCAGATGCTCCAGCCTACAAGCAGGGGCAGAACCAGCTC |
| | | TACAACGAACTCAATCTTGGTCGGAGAGAGGAGTACGACGTGCTGGACAAG |
| | | CGGAGAGGACGGGACCCAGAAATGGGCGGGAAGCCGCGCAGAAAGAATCCC |
| | | CAAGAGGGCCTGTACAACGAGCTCCAAAAGGATAAGATGGCAGAAGCCTAT |
| | | AGCGAGATTGGTATGAAAGGGGAACGCAGAAGAGGCAAAGGCCACGACGGA |
| | | CTGTACCAGGGACTCAGCACCGCCACCAAGGACACCTATGACGCTCTTCAC |
| | | ATGCAGGCCCTGCCGCCTCGG |

139113

| | | |
|---|---|---|
| 139113-aa | 862 | MALPVTALLLPLALLLHAARPEVQLVETGGGLVQPGGSLRLSCAVSGFALS |
| Full CAR | | NHGMSWVRRAPGKGLEWVSGIVYSGSTYYAASVKGRFTISRDNSRNTLYLQ |
| | | MNSLRPEDTAIYYCSAHGGESDVWGQGTTVTVSSASGGGGSGGRASGGGGS |
| | | ETTLTQSPATLSVSPGERATLSCRASQSVGSNLAWYQQKPGQGPRLLIYGA |
| | | STRATGIPARFSGSGSGTEFTLTISSLQPEDFAVYYCQQYNDWLPVTFGQG |
| | | TKVEIKTTTPAPRPPTPAPTIASQPLSLRPEACRPAAGGAVHTRGLDFACD |
| | | IYIWAPLAGTCGVLLLSLVITLYCKRGRKKLLYIFKQPFMRPVQTTQEEDG |
| | | CSCRFPEEEEGGCELRVKESRSADAPAYKQGQNQLYNELNLGRREEYDVLD |
| | | KRRGRDPEMGGKPRRKNPQEGLYNELQKDKMAEAYSEIGMKGERRRGKGHD |
| | | GLYQGLSTATKDTYDALHMQALPPR |
| 139113-nt | 877 | ATGGCCCTCCCTGTCACCGCCCTGCTGCTTCCGCTGGCTCTTCTGCTCCAC |
| Full CAR | | GCCGCTCGGCCCGAAGTGCAATTGGTGGAAACTGGAGGAGGACTTGTGCAA |
| | | CCTGGAGGATCATTGCGGCTCTCATGCGCTGTCTCCGGCTTCGCCCTGTCA |
| | | AATCACGGGATGTCGTGGGTCAGACGGGCCCCGGGAAAGGGTCTGGAATGG |
| | | GTGTCGGGGATTGTGTACAGCGGCTCCACCTACTACGCCGCTTCGGTCAAG |
| | | GGCCGCTTCACTATTTCACGGGACAACAGCCGCAACACCCTCTATCTGCAA |
| | | ATGAACTCTCTCCGCCCGGAGGATACCGCCATCTACTACTGCTCCGCACAC |
| | | GGCGGCGAATCCGACGTGTGGGGACAGGGAACCACTGTCACCGTGTCGTCC |
| | | GCATCCGGTGGCGGAGGATCGGGTGGCCGGGCCTCCGGGGGCGGCGGCAGC |
| | | GAGACTACCCTGACCCAGTCCCCTGCCACTCTGTCCGTGAGCCCGGGAGAG |
| | | AGAGCCACCCTTAGCTGCCGGGCCAGCCAGAGCGTGGGCTCCAACCTGGCC |
| | | TGGTACCAGCAGAAGCCAGGACAGGGTCCCAGGCTGCTGATCTACGGAGCC |
| | | TCCACTCGCGCGACCGGCATCCCCGCGAGGTTCTCCGGGTCGGGTTCCGGG |
| | | ACCGAGTTCACCCTGACCATCTCCTCCCTCCAACCGGAGGACTTCGCGGTG |
| | | TACTACTGTCAGCAGTACAACGATTGGCTGCCCGTGACATTTGGACAGGGG |
| | | ACGAAGGTGGAAATCAAAACCACTACCCCAGCACCGAGGCCACCCACCCCG |
| | | GCTCCTACCATCGCCTCCCAGCCTCTGTCCCTGCGTCCGGAGGCATGTAGA |
| | | CCCGCAGCTGGTGGGGCCGTGCATACCCGGGGTCTTGACTTCGCCTGCGAT |
| | | ATCTACATTTGGGCCCCTCTGGCTGGTACTTGCGGGGTCCTGCTGCTTTCA |
| | | CTCGTGATCACTCTTTACTGTAAGCGCGGTCGGAAGAAGCTGCTGTACATC |
| | | TTTAAGCAACCCTTCATGAGGCCTGTGCAGACTACTCAAGAGGAGGACGGC |
| | | TGTTCATGCCGGTTCCCAGAGGAGGAGGAAGGCGGCTGCGAACTGCGCGTG |
| | | AAATTCAGCCGCAGCGCAGATGCTCCAGCCTACAAGCAGGGGCAGAACCAG |
| | | CTCTACAACGAACTCAATCTTGGTCGGAGAGAGGAGTACGACGTGCTGGAC |
| | | AAGCGGAGAGGACGGGACCCAGAAATGGGCGGGAAGCCGCGCAGAAAGAAT |
| | | CCCCAAGAGGGCCTGTACAACGAGCTCCAAAAGGATAAGATGGCAGAAGCC |
| | | TATAGCGAGATTGGTATGAAAGGGGAACGCAGAAGAGGCAAAGGCCACGAC |
| | | GGACTGTACCAGGGACTCAGCACCGCCACCAAGGACACCTATGACGCTCTT |
| | | CACATGCAGGCCCTGCCGCCTCGG |

139114

| | | |
|---|---|---|
| 139114-aa | 863 | MALPVTALLLPLALLLHAARPEVQLVESGGGLVQPGGSLRLSCAVSGFALS |
| Full CAR | | NHGMSWVRRAPGKGLEWVSGIVYSGSTYYAASVKGRFTISRDNSRNTLYLQ |
| | | MNSLRPEDTAIYYCSAHGGESDVWGQGTTVTVSSASGGGGSGGRASGGGGS |
| | | EIVLTQSPGTLSLSPGERATLSCRASQSIGSSSLAWYQQKPGQAPRLLMYG |
| | | ASSRASGIPDRFSGSGSGTDETLTISRLEPEDFAVYYCQQYAGSPPFTFGQ |
| | | GTKVEIKTTTPAPRPPTPAPTIASQPLSLRPEACRPAAGGAVHTRGLDFAC |
| | | DIYIWAPLAGTCGVLLLSLVITLYCKRGRKKLLYIFKQPFMRPVQTTQEED |
| | | GCSCRFPEEEEGGCELRVKESRSADAPAYKQGQNQLYNELNLGRREEYDVL |
| | | DKRRGRDPEMGGKPRRKNPQEGLYNELQKDKMAEAYSEIGMKGERRRGKGH |
| | | DGLYQGLSTATKDTYDALHMQALPPR |
| 139114-nt | 878 | ATGGCCCTCCCTGTCACCGCCCTGCTGCTTCCGCTGGCTCTTCTGCTCCAC |
| Full CAR | | GCCGCTCGGCCCGAAGTGCAATTGGTGGAATCTGGTGGAGGACTTGTGCAA |
| | | CCTGGAGGATCACTGAGACTGTCATGCGCGGTGTCCGGTTTTGCCCTGAGC |
| | | AATCATGGGATGTCGTGGGTCCGGCGCGCCCCCGGAAAGGGTCTGGAATGG |
| | | GTGTCGGGTATCGTCTACTCCGGGAGCACTTACTACGCCGCGAGCGTGAAG |
| | | GGCCGCTTCACCATTTCCCGCGATAACTCCCGCAACACCCTGTACTTGCAA |
| | | ATGAACTCGCTCCGGCCTGAGGACACTGCCATCTACTACTGCTCCGCACAC |
| | | GGAGGAGAATCCGACGTGTGGGGCCAGGGAACTACCGTGACCGTCAGCAGC |
| | | GCCTCCGGCGGCGGGGGCTCAGGCGGACGGGCTAGCGGCGGCGGTGGCTCC |
| | | GAGATCGTGCTGACCCAGTCGCCTGGCACTCTCTCGCTGAGCCCCGGGGAA |
| | | AGGGCAACCCTGTCCTGTCGGGCCAGCCAGTCCATTGGATCATCCTCCCTC |
| | | GCCTGGTATCAGCAGAAACCGGGACAGGCTCCGCGGCTGCTTATGTATGGG |
| | | GCCAGCTCAAGAGCCTCCGGCATTCCCGACCGGTTCTCCGGGTCCGGTTCC |
| | | GGCACCGATTTCACCCTGACTATCTCGAGGCTGGAGCCAGAGGACTTCGCC |
| | | GTGTACTACTGCCAGCAGTACGCGGGGTCCCCGCCGTTCACGTTCGGACAG |
| | | GGAACCAAGGTCGAGATCAAGACCACTACCCCAGCACCGAGGCCACCCACC |
| | | CCGGCTCCTACCATCGCCTCCCAGCCTCTGTCCCTGCGTCCGGAGGCATGT |
| | | AGACCCGCAGCTGGTGGGGCCGTGCATACCCGGGGTCTTGACTTCGCCTGC |
| | | GATATCTACATTTGGGCCCCTCTGGCTGGTACTTGCGGGGTCCTGCTGCTT |
| | | TCACTCGTGATCACTCTTTACTGTAAGCGCGGTCGGAAGAAGCTGCTGTAC |
| | | ATCTTTAAGCAACCCTTCATGAGGCCTGTGCAGACTACTCAAGAGGAGGAC |
| | | GGCTGTTCATGCCGGTTCCCAGAGGAGGAGGAAGGCGGCTGCGAACTGCGC |
| | | GTGAAATTCAGCCGCAGCGCAGATGCTCCAGCCTACAAGCAGGGGCAGAAC |
| | | CAGCTCTACAACGAACTCAATCTTGGTCGGAGAGAGGAGTACGACGTGCTG |
| | | GACAAGCGGAGAGGACGGGACCCAGAAATGGGCGGGAAGCCGCGCAGAAAG |
| | | AATCCCCAAGAGGGCCTGTACAACGAGCTCCAAAAGGATAAGATGGCAGAA |
| | | GCCTATAGCGAGATTGGTATGAAAGGGGAACGCAGAAGAGGCAAAGGCCAC |
| | | GACGGACTGTACCAGGGACTCAGCACCGCCACCAAGGACACCTATGACGCT |
| | | CTTCACATGCAGGCCCTGCCGCCTCGG |

149362

| | | |
|---|---|---|
| 149362-aa | 879 | MALPVTALLLPLALLLHAARPQVQLQESGPGLVKPSETLSLTCTVSGGSIS |
| Full CAR | | SSYYYWGWIRQPPGKGLEWIGSIYYSGSAYYNPSLKSRVTISVDTSKNQFS |
| | | LRLSSVTAADTAVYYCARHWQEWPDAFDIWGQGTMVTVSSGGGGSGGGGSG |
| | | GGGSETTLTQSPAFMSATPGDKVIISCKASQDIDDAMNWYQQKPGEAPLFI |
| | | IQSATSPVPGIPPRESGSGFGTDESLTINNIESEDAAYYFCLQHDNEPLTE |
| | | GQGTKLEIKTTTPAPRPPTPAPTIASQPLSLRPEACRPAAGGAVHTRGLDE |
| | | ACDIYIWAPLAGTCGVLLLSLVITLYCKRGRKKLLYIFKQPEMRPVQTTQE |
| | | EDGCSCRFPEEEEGGCELRVKESRSADAPAYKQGQNQLYNELNLGRREEYD |
| | | VLDKRRGRDPEMGGKPRRKNPQEGLYNELQKDKMAEAYSEIGMKGERRRGK |
| | | GHDGLYQGLSTATKDTYDALHMQALPPR |
| 149362-nt | 901 | ATGGCCCTCCCTGTCACCGCCCTGCTGCTTCCGCTGGCTCTTCTGCTCCAC |
| Full CAR | | GCCGCTCGGCCCCAAGTGCAGCTTCAGGAAAGCGGACCGGGCCTGGTCAAG |
| | | CCATCCGAAACTCTCTCCCTGACTTGCACTGTGTCTGGCGGTTCCATCTCA |
| | | TCGTCGTACTACTACTGGGGCTGGATTAGGCAGCCGCCCGGAAAGGGACTG |
| | | GAGTGGATCGGAAGCATCTACTATTCCGGCTCGGCGTACTACAACCCTAGC |
| | | CTCAAGTCGAGAGTGACCATCTCCGTGGATACCTCCAAGAACCAGTTTTCC |
| | | CTGCGCCTGAGCTCCGTGACCGCCGCTGACACCGCCGTGTACTACTGTGCT |
| | | CGGCATTGGCAGGAATGGCCCGATGCCTTCGACATTTGGGGCCAGGGCACT |
| | | ATGGTCACTGTGTCATCCGGGGGTGGAGGCAGCGGGGGAGGAGGGTCCGGG |
| | | GGGGGAGGTTCAGAGACAACCTTGACCCAGTCACCCGCATTCATGTCCGCC |
| | | ACTCCGGGAGACAAGGTCATCATCTCGTGCAAAGCGTCCCAGGATATCGAC |
| | | GATGCCATGAATTGGTACCAGCAGAAGCCTGGCGAAGCGCCGCTGTTCATT |
| | | ATCCAATCCGCAACCTCGCCCGTGCCTGGAATCCCACCGCGGTTCAGCGGC |
| | | AGCGGTTTCGGAACCGACTTTTCCCTGACCATTAACAACATTGAGTCCGAG |
| | | GACGCCGCCTACTACTTCTGCCTGCAACACGACAACTTCCCTCTCACGTTC |
| | | GGCCAGGGAACCAAGCTGGAAATCAAGACCACTACCCCAGCACCGAGGCCA |
| | | CCCACCCCGGCTCCTACCATCGCCTCCCAGCCTCTGTCCCTGCGTCCGGAG |
| | | GCATGTAGACCCGCAGCTGGTGGGGCCGTGCATACCCGGGGTCTTGACTTC |
| | | GCCTGCGATATCTACATTTGGGCCCCTCTGGCTGGTACTTGCGGGGTCCTG |
| | | CTGCTTTCACTCGTGATCACTCTTTACTGTAAGCGCGGTCGGAAGAAGCTG |
| | | CTGTACATCTTTAAGCAACCCTTCATGAGGCCTGTGCAGACTACTCAAGAG |
| | | GAGGACGGCTGTTCATGCCGGTTCCCAGAGGAGGAGGAAGGCGGCTGCGAA |
| | | CTGCGCGTGAAATTCAGCCGCAGCGCAGATGCTCCAGCCTACAAGCAGGGG |
| | | CAGAACCAGCTCTACAACGAACTCAATCTTGGTCGGAGAGAGGAGTACGAC |
| | | GTGCTGGACAAGCGGAGAGGACGGGACCCAGAAATGGGCGGGAAGCCGCGC |
| | | AGAAAGAATCCCCAAGAGGGCCTGTACAACGAGCTCCAAAAGGATAAGATG |
| | | GCAGAAGCCTATAGCGAGATTGGTATGAAAGGGGAACGCAGAAGAGGCAAA |
| | | GGCCACGACGGACTGTACCAGGGACTCAGCACCGCCACCAAGGACACCTAT |
| | | GACGCTCTTCACATGCAGGCCCTGCCGCCTCGG |

149363

| | | |
|---|---|---|
| 149363-aa | 880 | MALPVTALLLPLALLLHAARPQVNLRESGPALVKPTQTLTLTCTESGESLR |
| Full CAR | | TSGMCVSWIRQPPGKALEWLARIDWDEDKFYSTSLKTRLTISKDTSDNQVV |
| | | LRMTNMDPADTATYYCARSGAGGTSATAFDIWGPGTMVTVSSGGGGSGGGG |
| | | SGGGGSDIQMTQSPSSLSASVGDRVTITCRASQDIYNNLAWFQLKPGSAPR |
| | | SLMYAANKSQSGVPSRESGSASGTDETLTISSLQPEDFATYYCQHYYRFPY |
| | | SFGQGTKLEIKTTTPAPRPPTPAPTIASQPLSLRPEACRPAAGGAVHTRGL |
| | | DFACDIYIWAPLAGTCGVLLLSLVITLYCKRGRKKLLYIFKQPFMRPVQTT |
| | | QEEDGCSCRFPEEEEGGCELRVKFSRSADAPAYKQGQNQLYNELNLGRREE |
| | | YDVLDKRRGRDPEMGGKPRRKNPQEGLYNELQKDKMAEAYSEIGMKGERRR |
| | | GKGHDGLYQGLSTATKDTYDALHMQALPPR |
| 149363-nt | 902 | ATGGCCCTCCCTGTCACCGCCCTGCTGCTTCCGCTGGCTCTTCTGCTCCAC |
| Full CAR | | GCCGCTCGGCCCCAAGTCAATCTGCGCGAATCCGGCCCCGCCTTGGTCAAG |
| | | CCTACCCAGACCCTCACTCTGACCTGTACTTTCTCCGGCTTCTCCCTGCGG |
| | | ACTTCCGGGATGTGCGTGTCCTGGATCAGACAGCCTCCGGGAAAGGCCCTG |
| | | GAGTGGCTCGCTCGCATTGACTGGGATGAGGACAAGTTCTACTCCACCTCA |
| | | CTCAAGACCAGGCTGACCATCAGCAAAGATACCTCTGACAACCAAGTGGTG |
| | | CTCCGCATGACCAACATGGACCCAGCCGACACTGCCACTTACTACTGCGCG |
| | | AGGAGCGGAGCGGGCGGAACCTCCGCCACCGCCTTCGATATTTGGGGCCCG |
| | | GGTACCATGGTCACCGTGTCAAGCGGAGGAGGGGGGTCCGGGGGCGGCGGT |
| | | TCCGGGGGAGGCGGATCGGACATTCAGATGACTCAGTCACCATCGTCCCTG |
| | | AGCGCTAGCGTGGGCGACAGAGTGACAATCACTTGCCGGGCATCCCAGGAC |
| | | ATCTATAACAACCTTGCGTGGTTCCAGCTGAAGCCTGGTTCCGCACCGCGG |
| | | TCACTTATGTACGCCGCCAACAAGAGCCAGTCGGGAGTGCCGTCCCGGTTT |
| | | TCCGGTTCGGCCTCGGGAACTGACTTCACCCTGACGATCTCCAGCCTGCAA |
| | | CCCGAGGATTTCGCCACCTACTACTGCCAGCACTACTACCGCTTTCCCTAC |
| | | TCGTTCGGACAGGGAACCAAGCTGGAAATCAAGACCACTACCCCAGCACCG |
| | | AGGCCACCCACCCCGGCTCCTACCATCGCCTCCCAGCCTCTGTCCCTGCGT |
| | | CCGGAGGCATGTAGACCCGCAGCTGGTGGGGCCGTGCATACCCGGGGTCTT |
| | | GACTTCGCCTGCGATATCTACATTTGGGCCCCTCTGGCTGGTACTTGCGGG |
| | | GTCCTGCTGCTTTCACTCGTGATCACTCTTTACTGTAAGCGCGGTCGGAAG |
| | | AAGCTGCTGTACATCTTTAAGCAACCCTTCATGAGGCCTGTGCAGACTACT |
| | | CAAGAGGAGGACGGCTGTTCATGCCGGTTCCCAGAGGAGGAGGAAGGCGGC |
| | | TGCGAACTGCGCGTGAAATTCAGCCGCAGCGCAGATGCTCCAGCCTACAAG |
| | | CAGGGGCAGAACCAGCTCTACAACGAACTCAATCTTGGTCGGAGAGAGGAG |
| | | TACGACGTGCTGGACAAGCGGAGAGGACGGGACCCAGAAATGGGCGGGAAG |
| | | CCGCGCAGAAAGAATCCCCAAGAGGGCCTGTACAACGAGCTCCAAAAGGAT |
| | | AAGATGGCAGAAGCCTATAGCGAGATTGGTATGAAAGGGGAACGCAGAAGA |
| | | GGCAAAGGCCACGACGGACTGTACCAGGGACTCAGCACCGCCACCAAGGAC |
| | | ACCTATGACGCTCTTCACATGCAGGCCCTGCCGCCTCGG |

149364

| | | |
|---|---|---|
| 149364-aa | 881 | MALPVTALLLPLALLLHAARPEVQLVESGGGLVKPGGSLRLSCAASGFTFS |
| Full CAR | | SYSMNWVRQAPGKGLEWVSSISSSSSYIYYADSVKGRFTISRDNAKNSLYL |
| | | QMNSLRAEDTAVYYCAKTIAAVYAFDIWGQGTTVTVSSGGGGSGGGGSGGG |
| | | GSEIVLTQSPLSLPVTPEEPASISCRSSQSLLHSNGYNYLDWYLQKPGQSP |
| | | QLLIYLGSNRASGVPDRFSGSGSGTDFTLKISRVEAEDVGVYYCMQALQTP |
| | | YTFGQGTKLEIKTTTPAPRPPTPAPTIASQPLSLRPEACRPAAGGAVHTRG |
| | | LDFACDIYIWAPLAGTCGVLLLSLVITLYCKRGRKKLLYIFKQPFMRPVQT |
| | | TQEEDGCSCRFPEEEEGGCELRVKESRSADAPAYKQGQNQLYNELNLGRRE |
| | | EYDVLDKRRGRDPEMGGKPRRKNPQEGLYNELQKDKMAEAYSEIGMKGERR |
| | | RGKGHDGLYQGLSTATKDTYDALHMQALPPR |
| 149364-nt | 903 | ATGGCCCTCCCTGTCACCGCCCTGCTGCTTCCGCTGGCTCTTCTGCTCCAC |
| Full CAR | | GCCGCTCGGCCCGAAGTGCAGCTTGTCGAATCCGGGGGGGGACTGGTCAAG |
| | | CCGGGCGGATCACTGAGACTGTCCTGCGCCGCGAGCGGCTTCACGTTCTCC |
| | | TCCTACTCCATGAACTGGGTCCGCCAAGCCCCCGGGAAGGGACTGGAATGG |
| | | GTGTCCTCTATCTCCTCGTCGTCGTCCTACATCTACTACGCCGACTCCGTG |
| | | AAGGGAAGATTCACCATTTCCCGCGACAACGCAAAGAACTCACTGTACTTG |
| | | CAAATGAACTCACTCCGGGCCGAAGATACTGCTGTGTACTATTGCGCCAAG |
| | | ACTATTGCCGCCGTCTACGCTTTCGACATCTGGGGCCAGGGAACCACCGTG |
| | | ACTGTGTCGTCCGGTGGTGGTGGCTCGGGCGGAGGAGGAAGCGGCGGCGGG |
| | | GGGTCCGAGATTGTGCTGACCCAGTCGCCACTGAGCCTCCCTGTGACCCCC |
| | | GAGGAACCCGCCAGCATCAGCTGCCGGTCCAGCCAGTCCCTGCTCCACTCC |
| | | AACGGATACAATTACCTCGATTGGTACCTTCAGAAGCCTGGACAAAGCCCG |
| | | CAGCTGCTCATCTACTTGGGATCAAACCGCGCGTCAGGAGTGCCTGACCGG |
| | | TTCTCCGGCTCGGGCAGCGGTACCGATTTCACCCTGAAAATCTCCAGGGTG |
| | | GAGGCAGAGGACGTGGGAGTGTATTACTGTATGCAGGCGCTGCAGACTCCG |
| | | TACACATTTGGGCAGGGCACCAAGCTGGAGATCAAGACCACTACCCCAGCA |
| | | CCGAGGCCACCCACCCCGGCTCCTACCATCGCCTCCCAGCCTCTGTCCCTG |
| | | CGTCCGGAGGCATGTAGACCCGCAGCTGGTGGGGCCGTGCATACCCGGGGT |
| | | CTTGACTTCGCCTGCGATATCTACATTTGGGCCCCTCTGGCTGGTACTTGC |
| | | GGGGTCCTGCTGCTTTCACTCGTGATCACTCTTTACTGTAAGCGCGGTCGG |
| | | AAGAAGCTGCTGTACATCTTTAAGCAACCCTTCATGAGGCCTGTGCAGACT |
| | | ACTCAAGAGGAGGACGGCTGTTCATGCCGGTTCCCAGAGGAGGAGGAAGGC |
| | | GGCTGCGAACTGCGCGTGAAATTCAGCCGCAGCGCAGATGCTCCAGCCTAC |
| | | AAGCAGGGGCAGAACCAGCTCTACAACGAACTCAATCTTGGTCGGAGAGAG |
| | | GAGTACGACGTGCTGGACAAGCGGAGAGGACGGGACCCAGAAATGGGCGGG |
| | | AAGCCGCGCAGAAAGAATCCCCAAGAGGGCCTGTACAACGAGCTCCAAAAG |
| | | GATAAGATGGCAGAAGCCTATAGCGAGATTGGTATGAAAGGGGAACGCAGA |
| | | AGAGGCAAAGGCCACGACGGACTGTACCAGGGACTCAGCACCGCCACCAAG |
| | | GACACCTATGACGCTCTTCACATGCAGGCCCTGCCGCCTCGG |

149365

| | | |
|---|---|---|
| 149365-aa | 882 | MALPVTALLLPLALLLHAARPEVQLVESGGGLVKPGGSLRLSCAASGFTFS |
| Full CAR | | DYYMSWIRQAPGKGLEWVSYISSSGSTIYYADSVKGRFTISRDNAKNSLYL |
| | | QMNSLRAEDTAVYYCARDLRGAFDIWGQGTMVTVSSGGGGSGGGGSGGGGS |
| | | SYVLTQSPSVSAAPGYTATISCGGNNIGTKSVHWYQQKPGQAPLLVIRDDS |
| | | VRPSKIPGRFSGSNSGNMATLTISGVQAGDEADFYCQVWDSDSEHVVFGGG |
| | | TKLTVLTTTPAPRPPTPAPTIASQPLSLRPEACRPAAGGAVHTRGLDFACD |
| | | IYIWAPLAGTCGVLLLSLVITLYCKRGRKKLLYIFKQPEMRPVQTTQEEDG |
| | | CSCRFPEEEEGGCELRVKESRSADAPAYKQGQNQLYNELNLGRREEYDVLD |
| | | KRRGRDPEMGGKPRRKNPQEGLYNELQKDKMAEAYSEIGMKGERRRGKGHD |
| | | GLYQGLSTATKDTYDALHMQALPPR |
| 149365-nt | 904 | ATGGCCCTCCCTGTCACCGCCCTGCTGCTTCCGCTGGCTCTTCTGCTCCAC |
| Full CAR | | GCCGCTCGGCCCGAAGTCCAGCTCGTGGAGTCCGGCGGAGGCCTTGTGAAG |
| | | CCTGGAGGTTCGCTGAGACTGTCCTGCGCCGCCTCCGGCTTCACCTTCTCC |
| | | GACTACTACATGTCCTGGATCAGACAGGCCCCGGGAAAGGGCCTGGAATGG |
| | | GTGTCCTACATCTCGTCATCGGGCAGCACTATCTACTACGCGGACTCAGTG |
| | | AAGGGGCGGTTCACCATTTCCCGGGATAACGCGAAGAACTCGCTGTATCTG |
| | | CAAATGAACTCACTGAGGGCCGAGGACACCGCCGTGTACTACTGCGCCCGC |
| | | GATCTCCGCGGGGCATTTGACATCTGGGGACAGGGAACCATGGTCACAGTG |
| | | TCCAGCGGAGGGGGAGGATCGGGTGGCGGAGGTTCCGGGGGTGGAGGCTCC |
| | | TCCTACGTGCTGACTCAGAGCCCAAGCGTCAGCGCTGCGCCCGGTTACACG |
| | | GCAACCATCTCCTGTGGCGGAAACAACATTGGGACCAAGTCTGTGCACTGG |
| | | TATCAGCAGAAGCCGGGCCAAGCTCCCCTGTTGGTGATCCGCGATGACTCC |
| | | GTGCGGCCTAGCAAAATTCCGGGACGGTTCTCCGGCTCCAACAGCGGCAAT |
| | | ATGGCCACTCTCACCATCTCGGGAGTGCAGGCCGGAGATGAAGCCGACTTC |
| | | TACTGCCAAGTCTGGGACTCAGACTCCGAGCATGTGGTGTTCGGGGGCGGA |
| | | ACCAAGCTGACTGTGCTCACCACTACCCCAGCACCGAGGCCACCCACCCCG |
| | | GCTCCTACCATCGCCTCCCAGCCTCTGTCCCTGCGTCCGGAGGCATGTAGA |
| | | CCCGCAGCTGGTGGGGCCGTGCATACCCGGGGTCTTGACTTCGCCTGCGAT |
| | | ATCTACATTTGGGCCCCTCTGGCTGGTACTTGCGGGGTCCTGCTGCTTTCA |
| | | CTCGTGATCACTCTTTACTGTAAGCGCGGTCGGAAGAAGCTGCTGTACATC |
| | | TTTAAGCAACCCTTCATGAGGCCTGTGCAGACTACTCAAGAGGAGGACGGC |
| | | TGTTCATGCCGGTTCCCAGAGGAGGAGGAAGGCGGCTGCGAACTGCGCGTG |
| | | AAATTCAGCCGCAGCGCAGATGCTCCAGCCTACAAGCAGGGGCAGAACCAG |
| | | CTCTACAACGAACTCAATCTTGGTCGGAGAGAGGAGTACGACGTGCTGGAC |
| | | AAGCGGAGAGGACGGGACCCAGAAATGGGCGGGAAGCCGCGCAGAAAGAAT |
| | | CCCCAAGAGGGCCTGTACAACGAGCTCCAAAAGGATAAGATGGCAGAAGCC |
| | | TATAGCGAGATTGGTATGAAAGGGGAACGCAGAAGAGGCAAAGGCCACGAC |
| | | GGACTGTACCAGGGACTCAGCACCGCCACCAAGGACACCTATGACGCTCTT |
| | | CACATGCAGGCCCTGCCGCCTCGG |

149366

| | | |
|---|---|---|
| 149366-aa | 883 | MALPVTALLLPLALLLHAARPQVQLVQSGAEVKKPGASVKVSCKPSGYTVT |
| Full CAR | | SHYIHWVRRAPGQGLEWMGMINPSGGVTAYSQTLQGRVTMTSDTSSSTVYM |
| | | ELSSLRSEDTAMYYCAREGSGSGWYFDFWGRGTLVTVSSGGGGSGGGGSGG |
| | | GGSSYVLTQPPSVSVSPGQTASITCSGDGLSKKYVSWYQQKAGQSPVVLIS |
| | | RDKERPSGIPDRFSGSNSADTATLTISGTQAMDEADYYCQAWDDTTVVEGG |
| | | GTKLTVLTTTPAPRPPTPAPTIASQPLSLRPEACRPAAGGAVHTRGLDFAC |
| | | DIYIWAPLAGTCGVLLLSLVITLYCKRGRKKLLYIFKQPFMRPVQTTQEED |
| | | GCSCRFPEEEEGGCELRVKESRSADAPAYKQGQNQLYNELNLGRREEYDVL |
| | | DKRRGRDPEMGGKPRRKNPQEGLYNELQKDKMAEAYSEIGMKGERRRGKGH |
| | | DGLYQGLSTATKDTYDALHMQALPPR |
| 149366-nt | 905 | ATGGCCCTCCCTGTCACCGCCCTGCTGCTTCCGCTGGCTCTTCTGCTCCAC |
| Full CAR | | GCCGCTCGGCCCCAAGTGCAGCTGGTGCAGAGCGGGGCCGAAGTCAAGAAG |
| | | CCGGGAGCCTCCGTGAAAGTGTCCTGCAAGCCTTCGGGATACACCGTGACC |
| | | TCCCACTACATTCATTGGGTCCGCCGCGCCCCCGGCCAAGGACTCGAGTGG |
| | | ATGGGCATGATCAACCCTAGCGGCGGAGTGACCGCGTACAGCCAGACGCTG |
| | | CAGGGACGCGTGACTATGACCTCGGATACCTCCTCCTCCACCGTCTATATG |
| | | GAACTGTCCAGCCTGCGGTCCGAGGATACCGCCATGTACTACTGCGCCCGG |
| | | GAAGGATCAGGCTCCGGGTGGTATTTCGACTTCTGGGGAAGAGGCACCCTC |
| | | GTGACTGTGTCATCTGGGGGAGGGGGTTCCGGTGGTGGCGGATCGGGAGGA |
| | | GGCGGTTCATCCTACGTGCTGACCCAGCCACCCTCCGTGTCCGTGAGCCCC |
| | | GGCCAGACTGCATCGATTACATGTAGCGGCGACGGCCTCTCCAAGAAATAC |
| | | GTGTCGTGGTACCAGCAGAAGGCCGGACAGAGCCCGGTGGTGCTGATCTCA |
| | | AGAGATAAGGAGCGGCCTAGCGGAATCCCGGACAGGTTCTCGGGTTCCAAC |
| | | TCCGCGGACACTGCTACTCTGACCATCTCGGGGACCCAGGCTATGGACGAA |
| | | GCCGATTACTACTGCCAAGCCTGGGACGACACTACTGTCGTGTTTGGAGGG |
| | | GGCACCAAGTTGACCGTCCTTACCACTACCCCAGCACCGAGGCCACCCACC |
| | | CCGGCTCCTACCATCGCCTCCCAGCCTCTGTCCCTGCGTCCGGAGGCATGT |
| | | AGACCCGCAGCTGGTGGGGCCGTGCATACCCGGGGTCTTGACTTCGCCTGC |
| | | GATATCTACATTTGGGCCCCTCTGGCTGGTACTTGCGGGGTCCTGCTGCTT |
| | | TCACTCGTGATCACTCTTTACTGTAAGCGCGGTCGGAAGAAGCTGCTGTAC |
| | | ATCTTTAAGCAACCCTTCATGAGGCCTGTGCAGACTACTCAAGAGGAGGAC |
| | | GGCTGTTCATGCCGGTTCCCAGAGGAGGAGGAAGGCGGCTGCGAACTGCGC |
| | | GTGAAATTCAGCCGCAGCGCAGATGCTCCAGCCTACAAGCAGGGGCAGAAC |
| | | CAGCTCTACAACGAACTCAATCTTGGTCGGAGAGAGGAGTACGACGTGCTG |
| | | GACAAGCGGAGAGGACGGGACCCAGAAATGGGCGGGAAGCCGCGCAGAAAG |
| | | AATCCCCAAGAGGGCCTGTACAACGAGCTCCAAAAGGATAAGATGGCAGAA |
| | | GCCTATAGCGAGATTGGTATGAAAGGGGAACGCAGAAGAGGCAAAGGCCAC |
| | | GACGGACTGTACCAGGGACTCAGCACCGCCACCAAGGACACCTATGACGCT |
| | | CTTCACATGCAGGCCCTGCCGCCTCGG |

149367

| | | |
|---|---|---|
| 149367-aa | 884 | MALPVTALLLPLALLLHAARPQVQLQESGPGLVKPSQTLSLTCTVSGGSIS |
| Full CAR | | SGGYYWSWIRQHPGKGLEWIGYIYYSGSTYYNPSLKSRVTISVDTSKNQFS |
| | | LKLSSVTAADTAVYYCARAGIAARLRGAFDIWGQGTMVTVSSGGGGSGGGG |
| | | SGGGGSDIVMTQSPSSVSASVGDRVIITCRASQGIRNWLAWYQQKPGKAPN |
| | | LLIYAASNLQSGVPSRESGSGSGADFTLTISSLQPEDVATYYCQKYNSAPF |
| | | TFGPGTKVDIKTTTPAPRPPTPAPTIASQPLSLRPEACRPAAGGAVHTRGL |
| | | DFACDIYIWAPLAGTCGVLLLSLVITLYCKRGRKKLLYIFKQPFMRPVQTT |
| | | QEEDGCSCRFPEEEEGGCELRVKFSRSADAPAYKQGQNQLYNELNLGRREE |
| | | YDVLDKRRGRDPEMGGKPRRKNPQEGLYNELQKDKMAEAYSEIGMKGERRR |
| | | GKGHDGLYQGLSTATKDTYDALHMQALPPR |
| 149367-nt | 906 | ATGGCCCTCCCTGTCACCGCCCTGCTGCTTCCGCTGGCTCTTCTGCTCCAC |
| Full CAR | | GCCGCTCGGCCCCAAGTGCAGCTTCAGGAGAGCGGCCCGGGACTCGTGAAG |
| | | CCGTCCCAGACCCTGTCCCTGACTTGCACCGTGTCGGGAGGAAGCATCTCG |
| | | AGCGGAGGCTACTATTGGTCGTGGATTCGGCAGCACCCTGGAAAGGGCCTG |
| | | GAATGGATCGGCTACATCTACTACTCCGGCTCGACCTACTACAACCCATCG |
| | | CTGAAGTCCAGAGTGACAATCTCAGTGGACACGTCCAAGAATCAGTTCAGC |
| | | CTGAAGCTCTCTTCCGTGACTGCGGCCGACACCGCCGTGTACTACTGCGCA |
| | | CGCGCTGGAATTGCCGCCCGGCTGAGGGGTGCCTTCGACATTTGGGGACAG |
| | | GGCACCATGGTCACCGTGTCCTCCGGCGGCGGAGGTTCCGGGGGTGGAGGC |
| | | TCAGGAGGAGGGGGGTCCGACATCGTCATGACTCAGTCGCCCTCAAGCGTC |
| | | AGCGCGTCCGTCGGGGACAGAGTGATCATCACCTGTCGGGCGTCCCAGGGA |
| | | ATTCGCAACTGGCTGGCCTGGTATCAGCAGAAGCCCGGAAAGGCCCCCAAC |
| | | CTGTTGATCTACGCCGCCTCAAACCTCCAATCCGGGGTGCCGAGCCGCTTC |
| | | AGCGGCTCCGGTTCGGGTGCCGATTTCACTCTGACCATCTCCTCCCTGCAA |
| | | CCTGAAGATGTGGCTACCTACTACTGCCAAAAGTACAACTCCGCACCTTTT |
| | | ACTTTCGGACCGGGGACCAAAGTGGACATTAAGACCACTACCCCAGCACCG |
| | | AGGCCACCCACCCCGGCTCCTACCATCGCCTCCCAGCCTCTGTCCCTGCGT |
| | | CCGGAGGCATGTAGACCCGCAGCTGGTGGGGCCGTGCATACCCGGGGTCTT |
| | | GACTTCGCCTGCGATATCTACATTTGGGCCCCTCTGGCTGGTACTTGCGGG |
| | | GTCCTGCTGCTTTCACTCGTGATCACTCTTTACTGTAAGCGCGGTCGGAAG |
| | | AAGCTGCTGTACATCTTTAAGCAACCCTTCATGAGGCCTGTGCAGACTACT |
| | | CAAGAGGAGGACGGCTGTTCATGCCGGTTCCCAGAGGAGGAGGAAGGCGGC |
| | | TGCGAACTGCGCGTGAAATTCAGCCGCAGCGCAGATGCTCCAGCCTACAAG |
| | | CAGGGGCAGAACCAGCTCTACAACGAACTCAATCTTGGTCGGAGAGAGGAG |
| | | TACGACGTGCTGGACAAGCGGAGAGGACGGGACCCAGAAATGGGCGGGAAG |
| | | CCGCGCAGAAAGAATCCCCAAGAGGGCCTGTACAACGAGCTCCAAAAGGAT |
| | | AAGATGGCAGAAGCCTATAGCGAGATTGGTATGAAAGGGGAACGCAGAAGA |
| | | GGCAAAGGCCACGACGGACTGTACCAGGGACTCAGCACCGCCACCAAGGAC |
| | | ACCTATGACGCTCTTCACATGCAGGCCCTGCCGCCTCGG |

149368

| | | |
|---|---|---|
| 149368-aa | 885 | MALPVTALLLPLALLLHAARPQVQLVQSGAEVKKPGSSVKVSCKASGGTFS |
| Full CAR | | SYAISWVRQAPGQGLEWMGGIIPIFGTANYAQKFQGRVTITADESTSTAYM |
| | | ELSSLRSEDTAVYYCARRGGYQLLRWDVGLLRSAFDIWGQGTMVTVSSGGG |
| | | GSGGGGSGGGGSSYVLTQPPSVSVAPGQTARITCGGNNIGSKSVHWYQQKP |
| | | GQAPVLVLYGKNNRPSGVPDRFSGSRSGTTASLTITGAQAEDEADYYCSSR |
| | | DSSGDHLRVFGTGTKVTVLTTTPAPRPPTPAPTIASQPLSLRPEACRPAAG |
| | | GAVHTRGLDFACDIYIWAPLAGTCGVLLLSLVITLYCKRGRKKLLYIFKQP |
| | | FMRPVQTTQEEDGCSCRFPEEEEGGCELRVKFSRSADAPAYKQGQNQLYNE |
| | | LNLGRREEYDVLDKRRGRDPEMGGKPRRKNPQEGLYNELQKDKMAEAYSEI |
| | | GMKGERRRGKGHDGLYQGLSTATKDTYDALHMQALPPR |
| 149368-nt | 907 | ATGGCCCTCCCTGTCACCGCCCTGCTGCTTCCGCTGGCTCTTCTGCTCCAC |
| Full CAR | | GCCGCTCGGCCCCAAGTGCAGCTGGTCCAGTCGGGCGCCGAGGTCAAGAAG |
| | | CCCGGGAGCTCTGTGAAAGTGTCCTGCAAGGCCTCCGGGGGCACCTTTAGC |
| | | TCCTACGCCATCTCCTGGGTCCGCCAAGCACCGGGTCAAGGCCTGGAGTGG |
| | | ATGGGGGGAATTATCCCTATCTTCGGCACTGCCAACTACGCCCAGAAGTTC |
| | | CAGGGACGCGTGACCATTACCGCGGACGAATCCACCTCCACCGCTTATATG |
| | | GAGCTGTCCAGCTTGCGCTCGGAAGATACCGCCGTGTACTACTGCGCCCGG |
| | | AGGGGTGGATACCAGCTGCTGAGATGGGACGTGGGCCTCCTGCGGTCGGCG |
| | | TTCGACATCTGGGGCCAGGGCACTATGGTCACTGTGTCCAGCGGAGGAGGC |
| | | GGATCGGGAGGCGGCGGATCAGGGGGAGGCGGTTCCAGCTACGTGCTTACT |
| | | CAACCCCCTTCGGTGTCCGTGGCCCCGGGACAGACCGCCAGAATCACTTGC |
| | | GGAGGAAACAACATTGGGTCCAAGAGCGTGCATTGGTACCAGCAGAAGCCA |
| | | GGACAGGCCCCTGTGCTGGTGCTCTACGGGAAGAACAATCGGCCCAGCGGA |
| | | GTGCCGGACAGGTTCTCGGGTTCACGCTCCGGTACAACCGCTTCACTGACT |
| | | ATCACCGGGGCCCAGGCAGAGGATGAAGCGGACTACTACTGTTCCTCCCGG |
| | | GATTCATCCGGCGACCACCTCCGGGTGTTCGGAACCGGAACGAAGGTCACC |
| | | GTGCTGACCACTACCCCAGCACCGAGGCCACCCACCCCGGCTCCTACCATC |
| | | GCCTCCCAGCCTCTGTCCCTGCGTCCGGAGGCATGTAGACCCGCAGCTGGT |
| | | GGGGCCGTGCATACCCGGGGTCTTGACTTCGCCTGCGATATCTACATTTGG |
| | | GCCCCTCTGGCTGGTACTTGCGGGGTCCTGCTGCTTTCACTCGTGATCACT |
| | | CTTTACTGTAAGCGCGGTCGGAAGAAGCTGCTGTACATCTTTAAGCAACCC |
| | | TTCATGAGGCCTGTGCAGACTACTCAAGAGGAGGACGGCTGTTCATGCCGG |
| | | TTCCCAGAGGAGGAGGAAGGCGGCTGCGAACTGCGCGTGAAATTCAGCCGC |
| | | AGCGCAGATGCTCCAGCCTACAAGCAGGGGCAGAACCAGCTCTACAACGAA |
| | | CTCAATCTTGGTCGGAGAGAGGAGTACGACGTGCTGGACAAGCGGAGAGGA |
| | | CGGGACCCAGAAATGGGCGGGAAGCCGCGCAGAAAGAATCCCCAAGAGGGC |
| | | CTGTACAACGAGCTCCAAAAGGATAAGATGGCAGAAGCCTATAGCGAGATT |
| | | GGTATGAAAGGGGAACGCAGAAGAGGCAAAGGCCACGACGGACTGTACCAG |
| | | GGACTCAGCACCGCCACCAAGGACACCTATGACGCTCTTCACATGCAGGCC |
| | | CTGCCGCCTCGG |

149369

| | | |
|---|---|---|
| 149369-aa | 886 | MALPVTALLLPLALLLHAARPEVQLQQSGPGLVKPSQTLSLTCAISGDSVS |
| Full CAR | | SNSAAWNWIRQSPSRGLEWLGRTYYRSKWYSFYAISLKSRIIINPDTSKNQ |
| | | FSLQLKSVTPEDTAVYYCARSSPEGLFLYWEDPWGQGTLVTVSSGGDGSGG |
| | | GGSGGGGSSSELTQDPAVSVALGQTIRITCQGDSLGNYYATWYQQKPGQAP |
| | | VLVIYGTNNRPSGIPDRFSASSSGNTASLTITGAQAEDEADYYCNSRDSSG |
| | | HHLLFGTGTKVTVLTTTPAPRPPTPAPTIASQPLSLRPEACRPAAGGAVHT |
| | | RGLDFACDIYIWAPLAGTCGVLLLSLVITLYCKRGRKKLLYIFKQPFMRPV |
| | | QTTQEEDGCSCRFPEEEEGGCELRVKESRSADAPAYKQGQNQLYNELNLGR |
| | | REEYDVLDKRRGRDPEMGGKPRRKNPQEGLYNELQKDKMAEAYSEIGMKGE |
| | | RRRGKGHDGLYQGLSTATKDTYDALHMQALPPR |
| 149369-nt | 908 | ATGGCCCTCCCTGTCACCGCCCTGCTGCTTCCGCTGGCTCTTCTGCTCCAC |
| Full CAR | | GCCGCTCGGCCCGAAGTGCAGCTCCAACAGTCAGGACCGGGGCTCGTGAAG |
| | | CCATCCCAGACCCTGTCCCTGACTTGTGCCATCTCGGGAGATAGCGTGTCA |
| | | TCGAACTCCGCCGCCTGGAACTGGATTCGGCAGAGCCCGTCCCGCGGACTG |
| | | GAGTGGCTTGGAAGGACCTACTACCGGTCCAAGTGGTACTCTTTCTACGCG |
| | | ATCTCGCTGAAGTCCCGCATTATCATTAACCCTGATACCTCCAAGAATCAG |
| | | TTCTCCCTCCAACTGAAATCCGTCACCCCCGAGGACACAGCAGTGTATTAC |
| | | TGCGCACGGAGCAGCCCCGAAGGACTGTTCCTGTATTGGTTTGACCCCTGG |
| | | GGCCAGGGGACTCTTGTGACCGTGTCGAGCGGCGGAGATGGGTCCGGTGGC |
| | | GGTGGTTCGGGGGGCGGCGGATCATCATCCGAACTGACCCAGGACCCGGCT |
| | | GTGTCCGTGGCGCTGGGACAAACCATCCGCATTACGTGCCAGGGAGACTCC |
| | | CTGGGCAACTACTACGCCACTTGGTACCAGCAGAAGCCGGGCCAAGCCCCT |
| | | GTGTTGGTCATCTACGGGACCAACAACAGACCTTCCGGCATCCCCGACCGG |
| | | TTCAGCGCTTCGTCCTCCGGCAACACTGCCAGCCTGACCATCACTGGAGCG |
| | | CAGGCCGAAGATGAGGCCGACTACTACTGCAACAGCAGAGACTCCTCGGGT |
| | | CATCACCTCTTGTTCGGAACTGGAACCAAGGTCACCGTGCTGACCACTACC |
| | | CCAGCACCGAGGCCACCCACCCCGGCTCCTACCATCGCCTCCCAGCCTCTG |
| | | TCCCTGCGTCCGGAGGCATGTAGACCCGCAGCTGGTGGGGCCGTGCATACC |
| | | CGGGGTCTTGACTTCGCCTGCGATATCTACATTTGGGCCCCTCTGGCTGGT |
| | | ACTTGCGGGGTCCTGCTGCTTTCACTCGTGATCACTCTTTACTGTAAGCGC |
| | | GGTCGGAAGAAGCTGCTGTACATCTTTAAGCAACCCTTCATGAGGCCTGTG |
| | | CAGACTACTCAAGAGGAGGACGGCTGTTCATGCCGGTTCCCAGAGGAGGAG |
| | | GAAGGCGGCTGCGAACTGCGCGTGAAATTCAGCCGCAGCGCAGATGCTCCA |
| | | GCCTACAAGCAGGGGCAGAACCAGCTCTACAACGAACTCAATCTTGGTCGG |
| | | AGAGAGGAGTACGACGTGCTGGACAAGCGGAGAGGACGGGACCCAGAAATG |
| | | GGCGGGAAGCCGCGCAGAAAGAATCCCCAAGAGGGCCTGTACAACGAGCTC |
| | | CAAAAGGATAAGATGGCAGAAGCCTATAGCGAGATTGGTATGAAAGGGGAA |
| | | CGCAGAAGAGGCAAAGGCCACGACGGACTGTACCAGGGACTCAGCACCGCC |
| | | ACCAAGGACACCTATGACGCTCTTCACATGCAGGCCCTGCCGCCTCGG |

BCMA_EBB-C1978-A4

| | | |
|---|---|---|
| BCMA EBB- | 887 | MALPVTALLLPLALLLHAARPEVQLVESGGGLVQPGGSLRLSCAASGFTFS |
| C1978-A4- | | SYAMSWVRQAPGKGLEWVSAISGSGGSTYYADSVKGRFTISRDNSKNTLYL |
| aa | | QMNSLRAEDTAVYYCAKVEGSGSLDYWGQGTLVTVSSGGGGSGGGGSGGGG |
| Full CAR | | SEIVMTQSPGTLSLSPGERATLSCRASQSVSSAYLAWYQQKPGQPPRLLIS |
| | | GASTRATGIPDRFGGSGSGTDETLTISRLEPEDFAVYYCQHYGSSENGSSL |
| | | FTFGQGTRLEIKTTTPAPRPPTPAPTIASQPLSLRPEACRPAAGGAVHTRG |
| | | LDFACDIYIWAPLAGTCGVLLLSLVITLYCKRGRKKLLYIFKQPFMRPVQT |
| | | TQEEDGCSCRFPEEEEGGCELRVKESRSADAPAYKQGQNQLYNELNLGRRE |
| | | EYDVLDKRRGRDPEMGGKPRRKNPQEGLYNELQKDKMAEAYSEIGMKGERR |
| | | RGKGHDGLYQGLSTATKDTYDALHMQALPPR |
| BCMA EBB- | 909 | ATGGCCCTCCCTGTCACCGCCCTGCTGCTTCCGCTGGCTCTTCTGCTCCAC |
| C1978-A4- | | GCCGCTCGGCCCGAAGTGCAGCTCGTGGAGTCAGGAGGCGGCCTGGTCCAG |
| nt | | CCGGGAGGGTCCCTTAGACTGTCATGCGCCGCAAGCGGATTCACTTTCTCC |
| Full CAR | | TCCTATGCCATGAGCTGGGTCCGCCAAGCCCCCGGAAAGGGACTGGAATGG |
| | | GTGTCCGCCATCTCGGGGTCTGGAGGCTCAACTTACTACGCTGACTCCGTG |
| | | AAGGGACGGTTCACCATTAGCCGCGACAACTCCAAGAACACCCTCTACCTC |
| | | CAAATGAACTCCCTGCGGGCCGAGGATACCGCCGTCTACTACTGCGCCAAA |
| | | GTGGAAGGTTCAGGATCGCTGGACTACTGGGGACAGGGTACTCTCGTGACC |
| | | GTGTCATCGGGCGGAGGAGGTTCCGGCGGTGGCGGCTCCGGCGGCGGAGGG |
| | | TCGGAGATCGTGATGACCCAGAGCCCTGGTACTCTGAGCCTTTCGCCGGGA |
| | | GAAAGGGCCACCCTGTCCTGCCGCGCTTCCCAATCCGTGTCCTCCGCGTAC |
| | | TTGGCGTGGTACCAGCAGAAGCCGGGACAGCCCCCTCGGCTGCTGATCAGC |
| | | GGGGCCAGCACCCGGGCAACCGGAATCCCAGACAGATTCGGGGGTTCCGGC |
| | | AGCGGCACAGATTTCACCCTGACTATTTCGAGGTTGGAGCCCGAGGACTTT |
| | | GCGGTGTATTACTGTCAGCACTACGGGTCGTCCTTTAATGGCTCCAGCCTG |
| | | TTCACGTTCGGACAGGGGACCCGCCTGGAAATCAAGACCACTACCCCAGCA |
| | | CCGAGGCCACCCACCCCGGCTCCTACCATCGCCTCCCAGCCTCTGTCCCTG |
| | | CGTCCGGAGGCATGTAGACCCGCAGCTGGTGGGGCCGTGCATACCCGGGGT |
| | | CTTGACTTCGCCTGCGATATCTACATTTGGGCCCCTCTGGCTGGTACTTGC |
| | | GGGGTCCTGCTGCTTTCACTCGTGATCACTCTTTACTGTAAGCGCGGTCGG |
| | | AAGAAGCTGCTGTACATCTTTAAGCAACCCTTCATGAGGCCTGTGCAGACT |
| | | ACTCAAGAGGAGGACGGCTGTTCATGCCGGTTCCCAGAGGAGGAGGAAGGC |
| | | GGCTGCGAACTGCGCGTGAAATTCAGCCGCAGCGCAGATGCTCCAGCCTAC |
| | | AAGCAGGGGCAGAACCAGCTCTACAACGAACTCAATCTTGGTCGGAGAGAG |
| | | GAGTACGACGTGCTGGACAAGCGGAGAGGACGGGACCCAGAAATGGGCGGG |
| | | AAGCCGCGCAGAAAGAATCCCCAAGAGGGCCTGTACAACGAGCTCCAAAAG |
| | | GATAAGATGGCAGAAGCCTATAGCGAGATTGGTATGAAAGGGGAACGCAGA |
| | | AGAGGCAAAGGCCACGACGGACTGTACCAGGGACTCAGCACCGCCACCAAG |
| | | GACACCTATGACGCTCTTCACATGCAGGCCCTGCCGCCTCGG |

BCMA_EBB-C1978-G1

| | | |
|---|---|---|
| BCMA EBB- | 888 | MALPVTALLLPLALLLHAARPEVQLVETGGGLVQPGGSLRLSCAASGITES |
| C1978-G1- | | RYPMSWVRQAPGKGLEWVSGISDSGVSTYYADSAKGRFTISRDNSKNTLFL |
| aa | | QMSSLRDEDTAVYYCVTRAGSEASDIWGQGTMVTVSSGGGGSGGGGSGGGG |
| Full CAR | | SEIVLTQSPATLSLSPGERATLSCRASQSVSNSLAWYQQKPGQAPRLLIYD |
| | | ASSRATGIPDRFSGSGSGTDFTLTISRLEPEDFAIYYCQQFGTSSGLTFGG |
| | | GTKLEIKTTTPAPRPPTPAPTIASQPLSLRPEACRPAAGGAVHTRGLDFAC |
| | | DIYIWAPLAGTCGVLLLSLVITLYCKRGRKKLLYIFKQPFMRPVQTTQEED |
| | | GCSCRFPEEEEGGCELRVKESRSADAPAYKQGQNQLYNELNLGRREEYDVL |
| | | DKRRGRDPEMGGKPRRKNPQEGLYNELQKDKMAEAYSEIGMKGERRRGKGH |
| | | DGLYQGLSTATKDTYDALHMQALPPR |
| BCMA EBB- | 910 | ATGGCCCTCCCTGTCACCGCCCTGCTGCTTCCGCTGGCTCTTCTGCTCCAC |
| C1978-G1- | | GCCGCTCGGCCCGAAGTGCAACTGGTGGAAACCGGTGGCGGCCTGGTGCAG |
| nt | | CCTGGAGGATCATTGAGGCTGTCATGCGCGGCCAGCGGTATTACCTTCTCC |
| Full CAR | | CGGTACCCCATGTCCTGGGTCAGACAGGCCCCGGGGAAAGGGCTTGAATGG |
| | | GTGTCCGGGATCTCGGACTCCGGTGTCAGCACTTACTACGCCGACTCCGCC |
| | | AAGGGACGCTTCACCATTTCCCGGGACAACTCGAAGAACACCCTGTTCCTC |
| | | CAAATGAGCTCCCTCCGGGACGAGGATACTGCAGTGTACTACTGCGTGACC |
| | | CGCGCCGGGTCCGAGGCGTCTGACATTTGGGGACAGGGCACTATGGTCACC |
| | | GTGTCGTCCGGCGGAGGGGGCTCGGGAGGCGGTGGCAGCGGAGGAGGAGGG |
| | | TCCGAGATCGTGCTGACCCAATCCCCGGCCACCCTCTCGCTGAGCCCTGGA |
| | | GAAAGGGCAACCTTGTCCTGTCGCGCGAGCCAGTCCGTGAGCAACTCCCTG |
| | | GCCTGGTACCAGCAGAAGCCCGGACAGGCTCCGAGACTTCTGATCTACGAC |
| | | GCTTCGAGCCGGGCCACTGGAATCCCCGACCGCTTTTCGGGGTCCGGCTCA |
| | | GGAACCGATTTCACCCTGACAATCTCACGGCTGGAGCCAGAGGATTTCGCC |
| | | ATCTATTACTGCCAGCAGTTCGGTACTTCCTCCGGCCTGACTTTCGGAGGC |
| | | GGCACGAAGCTCGAAATCAAGACCACTACCCCAGCACCGAGGCCACCCACC |
| | | CCGGCTCCTACCATCGCCTCCCAGCCTCTGTCCCTGCGTCCGGAGGCATGT |
| | | AGACCCGCAGCTGGTGGGGCCGTGCATACCCGGGGTCTTGACTTCGCCTGC |
| | | GATATCTACATTTGGGCCCCTCTGGCTGGTACTTGCGGGGTCCTGCTGCTT |
| | | TCACTCGTGATCACTCTTTACTGTAAGCGCGGTCGGAAGAAGCTGCTGTAC |
| | | ATCTTTAAGCAACCCTTCATGAGGCCTGTGCAGACTACTCAAGAGGAGGAC |
| | | GGCTGTTCATGCCGGTTCCCAGAGGAGGAGGAAGGCGGCTGCGAACTGCGC |
| | | GTGAAATTCAGCCGCAGCGCAGATGCTCCAGCCTACAAGCAGGGGCAGAAC |
| | | CAGCTCTACAACGAACTCAATCTTGGTCGGAGAGAGGAGTACGACGTGCTG |
| | | GACAAGCGGAGAGGACGGGACCCAGAAATGGGCGGGAAGCCGCGCAGAAAG |
| | | AATCCCCAAGAGGGCCTGTACAACGAGCTCCAAAAGGATAAGATGGCAGAA |
| | | GCCTATAGCGAGATTGGTATGAAAGGGGAACGCAGAAGAGGCAAAGGCCAC |
| | | GACGGACTGTACCAGGGACTCAGCACCGCCACCAAGGACACCTATGACGCT |
| | | CTTCACATGCAGGCCCTGCCGCCTCGG |

BCMA_EBB-C1979-C1

| | | |
|---|---|---|
| BCMA EBB- | 889 | MALPVTALLLPLALLLHAARPQVQLVESGGGLVQPGGSLRLSCAASGFTFS |
| C1979-C1- | | SYAMSWVRQAPGKGLEWVSAISGSGGSTYYADSVKGRFTISRDNAKNSLYL |
| aa | | QMNSLRAEDTAIYYCARATYKRELRYYYGMDVWGQGTMVTVSSGGGGSGGG |
| Full CAR | | GSGGGGSEIVMTQSPGTVSLSPGERATLSCRASQSVSSSFLAWYQQKPGQA |
| | | PRLLIYGASSRATGIPDRFSGSGSGTDFTLTISRLEPEDSAVYYCQQYHSS |
| | | PSWTFGQGTRLEIKTTTPAPRPPTPAPTIASQPLSLRPEACRPAAGGAVHT |
| | | RGLDFACDIYIWAPLAGTCGVLLLSLVITLYCKRGRKKLLYIFKQPEMRPV |
| | | QTTQEEDGCSCRFPEEEEGGCELRVKESRSADAPAYKQGQNQLYNELNLGR |
| | | REEYDVLDKRRGRDPEMGGKPRRKNPQEGLYNELQKDKMAEAYSEIGMKGE |
| | | RRRGKGHDGLYQGLSTATKDTYDALHMQALPPR |
| BCMA EBB- | 911 | ATGGCCCTCCCTGTCACCGCCCTGCTGCTTCCGCTGGCTCTTCTGCTCCAC |
| C1979-C1- | | GCCGCTCGGCCCCAAGTGCAGCTCGTGGAATCGGGTGGCGGACTGGTGCAG |
| nt | | CCGGGGGGCTCACTTAGACTGTCCTGCGCGGCCAGCGGATTCACTTTCTCC |
| Full CAR | | TCCTACGCCATGTCCTGGGTCAGACAGGCCCCTGGAAAGGGCCTGGAATGG |
| | | GTGTCCGCAATCAGCGGCAGCGGCGGCTCGACCTATTACGCGGATTCAGTG |
| | | AAGGGCAGATTCACCATTTCCCGGGACAACGCCAAGAACTCCTTGTACCTT |
| | | CAAATGAACTCCCTCCGCGCGGAAGATACCGCAATCTACTACTGCGCTCGG |
| | | GCCACTTACAAGAGGGAACTGCGCTACTACTACGGGATGGACGTCTGGGGC |
| | | CAGGGAACCATGGTCACCGTGTCCAGCGGAGGAGGAGGATCGGGAGGAGGC |
| | | GGTAGCGGGGGTGGAGGGTCGGAGATCGTGATGACCCAGTCCCCCGGCACT |
| | | GTGTCGCTGTCCCCCGGCGAACGGGCCACCCTGTCATGTCGGGCCAGCCAG |
| | | TCAGTGTCGTCAAGCTTCCTCGCCTGGTACCAGCAGAAACCGGGACAAGCT |
| | | CCCCGCCTGCTGATCTACGGAGCCAGCAGCCGGGCCACCGGTATTCCTGAC |
| | | CGGTTCTCCGGTTCGGGGTCCGGGACCGACTTTACTCTGACTATCTCTCGC |
| | | CTCGAGCCAGAGGACTCCGCCGTGTATTACTGCCAGCAGTACCACTCCTCC |
| | | CCGTCCTGGACGTTCGGACAGGGCACAAGGCTGGAGATTAAGACCACTACC |
| | | CCAGCACCGAGGCCACCCACCCCGGCTCCTACCATCGCCTCCCAGCCTCTG |
| | | TCCCTGCGTCCGGAGGCATGTAGACCCGCAGCTGGTGGGGCCGTGCATACC |
| | | CGGGGTCTTGACTTCGCCTGCGATATCTACATTTGGGCCCCTCTGGCTGGT |
| | | ACTTGCGGGGTCCTGCTGCTTTCACTCGTGATCACTCTTTACTGTAAGCGC |
| | | GGTCGGAAGAAGCTGCTGTACATCTTTAAGCAACCCTTCATGAGGCCTGTG |
| | | CAGACTACTCAAGAGGAGGACGGCTGTTCATGCCGGTTCCCAGAGGAGGAG |
| | | GAAGGCGGCTGCGAACTGCGCGTGAAATTCAGCCGCAGCGCAGATGCTCCA |
| | | GCCTACAAGCAGGGGCAGAACCAGCTCTACAACGAACTCAATCTTGGTCGG |
| | | AGAGAGGAGTACGACGTGCTGGACAAGCGGAGAGGACGGGACCCAGAAATG |
| | | GGCGGGAAGCCGCGCAGAAAGAATCCCCAAGAGGGCCTGTACAACGAGCTC |
| | | CAAAAGGATAAGATGGCAGAAGCCTATAGCGAGATTGGTATGAAAGGGGAA |
| | | CGCAGAAGAGGCAAAGGCCACGACGGACTGTACCAGGGACTCAGCACCGCC |
| | | ACCAAGGACACCTATGACGCTCTTCACATGCAGGCCCTGCCGCCTCGG |

BCMA_EBB-C1978-C7

| | | |
|---|---|---|
| BCMA EBB- | 890 | MALPVTALLLPLALLLHAARPEVQLVETGGGLVQPGGSLRLSCAASGFTFS |
| C1978-C7 | | SYAMSWVRQAPGKGLEWVSAISGSGGSTYYADSVKGRFTISRDNSKNTLYL |
| aa | | QMNTLKAEDTAVYYCARATYKRELRYYYGMDVWGQGTTVTVSSGGGGSGGG |
| Full CAR | | GSGGGGSEIVLTQSPSTLSLSPGESATLSCRASQSVSTTFLAWYQQKPGQA |
| | | PRLLIYGSSNRATGIPDRFSGSGSGTDFTLTIRRLEPEDFAVYYCQQYHSS |
| | | PSWTFGQGTKVEIKTTTPAPRPPTPAPTIASQPLSLRPEACRPAAGGAVHT |
| | | RGLDFACDIYIWAPLAGTCGVLLLSLVITLYCKRGRKKLLYIFKQPEMRPV |
| | | QTTQEEDGCSCRFPEEEEGGCELRVKESRSADAPAYKQGQNQLYNELNLGR |
| | | REEYDVLDKRRGRDPEMGGKPRRKNPQEGLYNELQKDKMAEAYSEIGMKGE |
| | | RRRGKGHDGLYQGLSTATKDTYDALHMQALPPR |
| BCMA EBB- | 912 | ATGGCCCTCCCTGTCACCGCCCTGCTGCTTCCGCTGGCTCTTCTGCTCCAC |
| C1978-C7- | | GCCGCTCGGCCCGAGGTGCAGCTTGTGGAAACCGGTGGCGGACTGGTGCAG |
| nt | | CCCGGAGGAAGCCTCAGGCTGTCCTGCGCCGCGTCCGGCTTCACCTTCTCC |
| Full CAR | | TCGTACGCCATGTCCTGGGTCCGCCAGGCCCCCGGAAAGGGCCTGGAATGG |
| | | GTGTCCGCCATCTCTGGAAGCGGAGGTTCCACGTACTACGCGGACAGCGTC |
| | | AAGGGAAGGTTCACAATCTCCCGCGATAATTCGAAGAACACTCTGTACCTT |
| | | CAAATGAACACCCTGAAGGCCGAGGACACTGCTGTGTACTACTGCGCACGG |
| | | GCCACCTACAAGAGAGAGCTCCGGTACTACTACGGAATGGACGTCTGGGGC |
| | | CAGGGAACTACTGTGACCGTGTCCTCGGGAGGGGGTGGCTCCGGGGGGGGC |
| | | GGCTCCGGCGGAGGCGGTTCCGAGATTGTGCTGACCCAGTCACCTTCAACT |
| | | CTGTCGCTGTCCCCGGGAGAGAGCGCTACTCTGAGCTGCCGGGCCAGCCAG |
| | | TCCGTGTCCACCACCTTCCTCGCCTGGTATCAGCAGAAGCCGGGGCAGGCA |
| | | CCACGGCTCTTGATCTACGGGTCAAGCAACAGAGCGACCGGAATTCCTGAC |
| | | CGCTTCTCGGGGAGCGGTTCAGGCACCGACTTCACCCTGACTATCCGGCGC |
| | | CTGGAACCCGAAGATTTCGCCGTGTATTACTGTCAACAGTACCACTCCTCG |
| | | CCGTCCTGGACCTTTGGCCAAGGAACCAAAGTGGAAATCAAGACCACTACC |
| | | CCAGCACCGAGGCCACCCACCCCGGCTCCTACCATCGCCTCCCAGCCTCTG |
| | | TCCCTGCGTCCGGAGGCATGTAGACCCGCAGCTGGTGGGGCCGTGCATACC |
| | | CGGGGTCTTGACTTCGCCTGCGATATCTACATTTGGGCCCCTCTGGCTGGT |
| | | ACTTGCGGGGTCCTGCTGCTTTCACTCGTGATCACTCTTTACTGTAAGCGC |
| | | GGTCGGAAGAAGCTGCTGTACATCTTTAAGCAACCCTTCATGAGGCCTGTG |
| | | CAGACTACTCAAGAGGAGGACGGCTGTTCATGCCGGTTCCCAGAGGAGGAG |
| | | GAAGGCGGCTGCGAACTGCGCGTGAAATTCAGCCGCAGCGCAGATGCTCCA |
| | | GCCTACAAGCAGGGGCAGAACCAGCTCTACAACGAACTCAATCTTGGTCGG |
| | | AGAGAGGAGTACGACGTGCTGGACAAGCGGAGAGGACGGGACCCAGAAATG |
| | | GGCGGGAAGCCGCGCAGAAAGAATCCCCAAGAGGGCCTGTACAACGAGCTC |
| | | CAAAAGGATAAGATGGCAGAAGCCTATAGCGAGATTGGTATGAAAGGGGAA |
| | | CGCAGAAGAGGCAAAGGCCACGACGGACTGTACCAGGGACTCAGCACCGCC |
| | | ACCAAGGACACCTATGACGCTCTTCACATGCAGGCCCTGCCGCCTCGG |

BCMA_EBB-C1978-D10

| | | |
|---|---|---|
| BCMA EBB- | 891 | MALPVTALLLPLALLLHAARPEVQLVETGGGLVQPGRSLRLSCAASGFTFD |
| C1978-D10- | | DYAMHWVRQAPGKGLEWVSGISWNSGSIGYADSVKGRFTISRDNAKNSLYL |
| aa | | QMNSLRDEDTAVYYCARVGKAVPDVWGQGTTVTVSSGGGGSGGGGSGGGGS |
| Full CAR | | DIVMTQTPSSLSASVGDRVTITCRASQSISSYLNWYQQKPGKAPKLLIYAA |
| | | SSLQSGVPSRESGSGSGTDFTLTISSLQPEDFATYYCQQSYSTPYSFGQGT |
| | | RLEIKTTTPAPRPPTPAPTIASQPLSLRPEACRPAAGGAVHTRGLDFACDI |
| | | YIWAPLAGTCGVLLLSLVITLYCKRGRKKLLYIFKQPFMRPVQTTQEEDGC |
| | | SCRFPEEEEGGCELRVKESRSADAPAYKQGQNQLYNELNLGRREEYDVLDK |
| | | RRGRDPEMGGKPRRKNPQEGLYNELQKDKMAEAYSEIGMKGERRRGKGHDG |
| | | LYQGLSTATKDTYDALHMQALPPR |
| BCMA EBB- | 913 | ATGGCCCTCCCTGTCACCGCCCTGCTGCTTCCGCTGGCTCTTCTGCTCCAC |
| C1978-D10 | | GCCGCTCGGCCCGAAGTGCAGCTCGTGGAAACTGGAGGTGGACTCGTGCAG |
| nt | | CCTGGACGGTCGCTGCGGCTGAGCTGCGCTGCATCCGGCTTCACCTTCGAC |
| Full CAR | | GATTATGCCATGCACTGGGTCAGACAGGCGCCAGGGAAGGGACTTGAGTGG |
| | | GTGTCCGGTATCAGCTGGAATAGCGGCTCAATCGGATACGCGGACTCCGTG |
| | | AAGGGAAGGTTCACCATTTCCCGCGACAACGCCAAGAACTCCCTGTACTTG |
| | | CAAATGAACAGCCTCCGGGATGAGGACACTGCCGTGTACTACTGCGCCCGC |
| | | GTCGGAAAAGCTGTGCCCGACGTCTGGGGCCAGGGAACCACTGTGACCGTG |
| | | TCCAGCGGCGGGGGTGGATCGGGCGGTGGAGGGTCCGGTGGAGGGGGCTCA |
| | | GATATTGTGATGACCCAGACCCCCTCGTCCCTGTCCGCCTCGGTCGGCGAC |
| | | CGCGTGACTATCACATGTAGAGCCTCGCAGAGCATCTCCAGCTACCTGAAC |
| | | TGGTATCAGCAGAAGCCGGGGAAGGCCCCGAAGCTCCTGATCTACGCGGCA |
| | | TCATCACTGCAATCGGGAGTGCCGAGCCGGTTTTCCGGGTCCGGCTCCGGC |
| | | ACCGACTTCACGCTGACCATTTCTTCCCTGCAACCCGAGGACTTCGCCACT |
| | | TACTACTGCCAGCAGTCCTACTCCACCCCTTACTCCTTCGGCCAAGGAACC |
| | | AGGCTGGAAATCAAGACCACTACCCCAGCACCGAGGCCACCCACCCCGGCT |
| | | CCTACCATCGCCTCCCAGCCTCTGTCCCTGCGTCCGGAGGCATGTAGACCC |
| | | GCAGCTGGTGGGGCCGTGCATACCCGGGGTCTTGACTTCGCCTGCGATATC |
| | | TACATTTGGGCCCCTCTGGCTGGTACTTGCGGGGTCCTGCTGCTTTCACTC |
| | | GTGATCACTCTTTACTGTAAGCGCGGTCGGAAGAAGCTGCTGTACATCTTT |
| | | AAGCAACCCTTCATGAGGCCTGTGCAGACTACTCAAGAGGAGGACGGCTGT |
| | | TCATGCCGGTTCCCAGAGGAGGAGGAAGGCGGCTGCGAACTGCGCGTGAAA |
| | | TTCAGCCGCAGCGCAGATGCTCCAGCCTACAAGCAGGGGCAGAACCAGCTC |
| | | TACAACGAACTCAATCTTGGTCGGAGAGAGGAGTACGACGTGCTGGACAAG |
| | | CGGAGAGGACGGGACCCAGAAATGGGCGGGAAGCCGCGCAGAAAGAATCCC |
| | | CAAGAGGGCCTGTACAACGAGCTCCAAAAGGATAAGATGGCAGAAGCCTAT |
| | | AGCGAGATTGGTATGAAAGGGGAACGCAGAAGAGGCAAAGGCCACGACGGA |
| | | CTGTACCAGGGACTCAGCACCGCCACCAAGGACACCTATGACGCTCTTCAC |
| | | ATGCAGGCCCTGCCGCCTCGG |

BCMA_EBB-C1979-C12

| | | |
|---|---|---|
| BCMA EBB- | 892 | MALPVTALLLPLALLLHAARPEVQLVESGGGLVQPGRSLRLSCTASGFTFD |
| C1979-C12- | | DYAMHWVRQRPGKGLEWVASINWKGNSLAYGDSVKGRFAISRDNAKNTVFL |
| aa | | QMNSLRTEDTAVYYCASHQGVAYYNYAMDVWGRGTLVTVSSGGGGSGGGGS |
| Full CAR | | GGGGSEIVLTQSPGTLSLSPGERATLSCRATQSIGSSFLAWYQQRPGQAPR |
| | | LLIYGASQRATGIPDRFSGRGSGTDFTLTISRVEPEDSAVYYCQHYESSPS |
| | | WTFGQGTKVEIKTTTPAPRPPTPAPTIASQPLSLRPEACRPAAGGAVHTRG |
| | | LDFACDIYIWAPLAGTCGVLLLSLVITLYCKRGRKKLLYIFKQPEMRPVQT |
| | | TQEEDGCSCRFPEEEEGGCELRVKESRSADAPAYKQGQNQLYNELNLGRRE |
| | | EYDVLDKRRGRDPEMGGKPRRKNPQEGLYNELQKDKMAEAYSEIGMKGERR |
| | | RGKGHDGLYQGLSTATKDTYDALHMQALPPR |
| BCMA EBB- | 914 | ATGGCCCTCCCTGTCACCGCCCTGCTGCTTCCGCTGGCTCTTCTGCTCCAC |
| C1979-C12- | | GCCGCTCGGCCCGAAGTGCAGCTCGTGGAGAGCGGGGGAGGATTGGTGCAG |
| nt | | CCCGGAAGGTCCCTGCGGCTCTCCTGCACTGCGTCTGGCTTCACCTTCGAC |
| Full CAR | | GACTACGCGATGCACTGGGTCAGACAGCGCCCGGGAAAGGGCCTGGAATGG |
| | | GTCGCCTCAATCAACTGGAAGGGAAACTCCCTGGCCTATGGCGACAGCGTG |
| | | AAGGGCCGCTTCGCCATTTCGCGCGACAACGCCAAGAACACCGTGTTTCTG |
| | | CAAATGAATTCCCTGCGGACCGAGGATACCGCTGTGTACTACTGCGCCAGC |
| | | CACCAGGGCGTGGCATACTATAACTACGCCATGGACGTGTGGGGAAGAGGG |
| | | ACGCTCGTCACCGTGTCCTCCGGGGGCGGTGGATCGGGTGGAGGAGGAAGC |
| | | GGTGGCGGGGGCAGCGAAATCGTGCTGACTCAGAGCCCGGGAACTCTTTCA |
| | | CTGTCCCCGGGAGAACGGGCCACTCTCTCGTGCCGGGCCACCCAGTCCATC |
| | | GGCTCCTCCTTCCTTGCCTGGTACCAGCAGAGGCCAGGACAGGCGCCCCGC |
| | | CTGCTGATCTACGGTGCTTCCCAACGCGCCACTGGCATTCCTGACCGGTTC |
| | | AGCGGCAGAGGGTCGGGAACCGATTTCACACTGACCATTTCCCGGGTGGAG |
| | | CCCGAAGATTCGGCAGTCTACTACTGTCAGCATTACGAGTCCTCCCCTTCA |
| | | TGGACCTTCGGTCAAGGGACCAAAGTGGAGATCAAGACCACTACCCCAGCA |
| | | CCGAGGCCACCCACCCCGGCTCCTACCATCGCCTCCCAGCCTCTGTCCCTG |
| | | CGTCCGGAGGCATGTAGACCCGCAGCTGGTGGGGCCGTGCATACCCGGGGT |
| | | CTTGACTTCGCCTGCGATATCTACATTTGGGCCCCTCTGGCTGGTACTTGC |
| | | GGGGTCCTGCTGCTTTCACTCGTGATCACTCTTTACTGTAAGCGCGGTCGG |
| | | AAGAAGCTGCTGTACATCTTTAAGCAACCCTTCATGAGGCCTGTGCAGACT |
| | | ACTCAAGAGGAGGACGGCTGTTCATGCCGGTTCCCAGAGGAGGAGGAAGGC |
| | | GGCTGCGAACTGCGCGTGAAATTCAGCCGCAGCGCAGATGCTCCAGCCTAC |
| | | AAGCAGGGGCAGAACCAGCTCTACAACGAACTCAATCTTGGTCGGAGAGAG |
| | | GAGTACGACGTGCTGGACAAGCGGAGAGGACGGGACCCAGAAATGGGCGGG |
| | | AAGCCGCGCAGAAAGAATCCCCAAGAGGGCCTGTACAACGAGCTCCAAAAG |
| | | GATAAGATGGCAGAAGCCTATAGCGAGATTGGTATGAAAGGGGAACGCAGA |
| | | AGAGGCAAAGGCCACGACGGACTGTACCAGGGACTCAGCACCGCCACCAAG |
| | | GACACCTATGACGCTCTTCACATGCAGGCCCTGCCGCCTCGG |

BCMA_EBB-C1980-G4

| | | |
|---|---|---|
| BCMA EBB- | 893 | MALPVTALLLPLALLLHAARPEVQLVESGGGLVQPGGSLRLSCAASGFTFS |
| C1980-G4- | | SYAMSWVRQAPGKGLEWVSAISGSGGSTYYADSVKGRFTISRDNSKNTLYL |
| aa | | QMNSLRAEDTAVYYCAKVVRDGMDVWGQGTTVTVSSGGGGSGGGGSGGGGS |
| Full CAR | | EIVLTQSPATLSLSPGERATLSCRASQSVSSSYLAWYQQKPGQAPRLLIYG |
| | | ASSRATGIPDRFSGNGSGTDETLTISRLEPEDFAVYYCQQYGSPPRFTFGP |
| | | GTKVDIKTTTPAPRPPTPAPTIASQPLSLRPEACRPAAGGAVHTRGLDFAC |
| | | DIYIWAPLAGTCGVLLLSLVITLYCKRGRKKLLYIFKQPFMRPVQTTQEED |
| | | GCSCRFPEEEEGGCELRVKESRSADAPAYKQGQNQLYNELNLGRREEYDVL |
| | | DKRRGRDPEMGGKPRRKNPQEGLYNELQKDKMAEAYSEIGMKGERRRGKGH |
| | | DGLYQGLSTATKDTYDALHMQALPPR |
| BCMA EBB- | 915 | ATGGCCCTCCCTGTCACCGCCCTGCTGCTTCCGCTGGCTCTTCTGCTCCAC |
| C1980-G4- | | GCCGCTCGGCCCGAGGTGCAGTTGGTCGAAAGCGGGGGCGGGCTTGTGCAG |
| nt | | CCTGGCGGATCACTGCGGCTGTCCTGCGCGGCATCAGGCTTCACGTTTTCT |
| Full CAR | | TCCTACGCCATGTCCTGGGTGCGCCAGGCCCCTGGAAAGGGACTGGAATGG |
| | | GTGTCCGCGATTTCGGGGTCCGGCGGGAGCACCTACTACGCCGATTCCGTG |
| | | AAGGGCCGCTTCACTATCTCGCGGGACAACTCCAAGAACACCCTCTACCTC |
| | | CAAATGAATAGCCTGCGGGCCGAGGATACCGCCGTCTACTATTGCGCTAAG |
| | | GTCGTGCGCGACGGAATGGACGTGTGGGGACAGGGTACCACCGTGACAGTG |
| | | TCCTCGGGGGGAGGCGGTAGCGGCGGAGGAGGAAGCGGTGGTGGAGGTTCC |
| | | GAGATTGTGCTGACTCAATCACCCGCGACCCTGAGCCTGTCCCCCGGCGAA |
| | | AGGGCCACTCTGTCCTGTCGGGCCAGCCAATCAGTCTCCTCCTCGTACCTG |
| | | GCCTGGTACCAGCAGAAGCCAGGACAGGCTCCGAGACTCCTTATCTATGGC |
| | | GCATCCTCCCGCGCCACCGGAATCCCGGATAGGTTCTCGGGAAACGGATCG |
| | | GGGACCGACTTCACTCTCACCATCTCCCGGCTGGAACCGGAGGACTTCGCC |
| | | GTGTACTACTGCCAGCAGTACGGCAGCCCGCCTAGATTCACTTTCGGCCCC |
| | | GGCACCAAAGTGGACATCAAGACCACTACCCCAGCACCGAGGCCACCCACC |
| | | CCGGCTCCTACCATCGCCTCCCAGCCTCTGTCCCTGCGTCCGGAGGCATGT |
| | | AGACCCGCAGCTGGTGGGGCCGTGCATACCCGGGGTCTTGACTTCGCCTGC |
| | | GATATCTACATTTGGGCCCCTCTGGCTGGTACTTGCGGGGTCCTGCTGCTT |
| | | TCACTCGTGATCACTCTTTACTGTAAGCGCGGTCGGAAGAAGCTGCTGTAC |
| | | ATCTTTAAGCAACCCTTCATGAGGCCTGTGCAGACTACTCAAGAGGAGGAC |
| | | GGCTGTTCATGCCGGTTCCCAGAGGAGGAGGAAGGCGGCTGCGAACTGCGC |
| | | GTGAAATTCAGCCGCAGCGCAGATGCTCCAGCCTACAAGCAGGGGCAGAAC |
| | | CAGCTCTACAACGAACTCAATCTTGGTCGGAGAGAGGAGTACGACGTGCTG |
| | | GACAAGCGGAGAGGACGGGACCCAGAAATGGGCGGGAAGCCGCGCAGAAAG |
| | | AATCCCCAAGAGGGCCTGTACAACGAGCTCCAAAAGGATAAGATGGCAGAA |
| | | GCCTATAGCGAGATTGGTATGAAAGGGGAACGCAGAAGAGGCAAAGGCCAC |
| | | GACGGACTGTACCAGGGACTCAGCACCGCCACCAAGGACACCTATGACGCT |
| | | CTTCACATGCAGGCCCTGCCGCCTCGG |

BCMA_EBB-C1980-D2

| | | |
|---|---|---|
| BCMA EBB- | 894 | MALPVTALLLPLALLLHAARPEVQLLESGGGLVQPGGSLRLSCAASGFTFS |
| C1980-D2- | | SYAMSWVRQAPGKGLEWVSAISGSGGSTYYADSVKGRFTISRDNSKNTLYL |
| aa | | QMNSLRAEDTAVYYCAKIPQTGTEDYWGQGTLVTVSSGGGGSGGGGSGGGG |
| Full CAR | | SEIVLTQSPGTLSLSPGERATLSCRASQSVSSSYLAWYQQRPGQAPRLLIY |
| | | GASSRATGIPDRFSGSGSGTDFTLTISRLEPEDFAVYYCQHYGSSPSWTFG |
| | | QGTRLEIKTTTPAPRPPTPAPTIASQPLSLRPEACRPAAGGAVHTRGLDFA |
| | | CDIYIWAPLAGTCGVLLLSLVITLYCKRGRKKLLYIFKQPFMRPVQTTQEE |
| | | DGCSCRFPEEEEGGCELRVKESRSADAPAYKQGQNQLYNELNLGRREEYDV |
| | | LDKRRGRDPEMGGKPRRKNPQEGLYNELQKDKMAEAYSEIGMKGERRRGKG |
| | | HDGLYQGLSTATKDTYDALHMQALPPR |
| BCMA EBB- | 916 | ATGGCCCTCCCTGTCACCGCCCTGCTGCTTCCGCTGGCTCTTCTGCTCCAC |
| C1980-D2- | | GCCGCTCGGCCCGAAGTGCAGCTGCTGGAGTCCGGCGGTGGATTGGTGCAA |
| nt | | CCGGGGGGATCGCTCAGACTGTCCTGTGCGGCGTCAGGCTTCACCTTCTCG |
| Full CAR | | AGCTACGCCATGTCATGGGTCAGACAGGCCCCTGGAAAGGGTCTGGAATGG |
| | | GTGTCCGCCATTTCCGGGAGCGGGGGATCTACATACTACGCCGATAGCGTG |
| | | AAGGGCCGCTTCACCATTTCCCGGGACAACTCCAAGAACACTCTCTATCTG |
| | | CAAATGAACTCCCTCCGCGCTGAGGACACTGCCGTGTACTACTGCGCCAAA |
| | | ATCCCTCAGACCGGCACCTTCGACTACTGGGGACAGGGGACTCTGGTCACC |
| | | GTCAGCAGCGGTGGCGGAGGTTCGGGGGGAGGAGGAAGCGGCGGCGGAGGG |
| | | TCCGAGATTGTGCTGACCCAGTCACCCGGCACTTTGTCCCTGTCGCCTGGA |
| | | GAAAGGGCCACCCTTTCCTGCCGGGCATCCCAATCCGTGTCCTCCTCGTAC |
| | | CTGGCCTGGTACCAGCAGAGGCCCGGACAGGCCCCACGGCTTCTGATCTAC |
| | | GGAGCAAGCAGCCGCGCGACCGGTATCCCGGACCGGTTTTCGGGCTCGGGC |
| | | TCAGGAACTGACTTCACCCTCACCATCTCCCGCCTGGAACCCGAAGATTTC |
| | | GCTGTGTATTACTGCCAGCACTACGGCAGCTCCCCGTCCTGGACGTTCGGC |
| | | CAGGGAACTCGGCTGGAGATCAAGACCACTACCCCAGCACCGAGGCCACCC |
| | | ACCCCGGCTCCTACCATCGCCTCCCAGCCTCTGTCCCTGCGTCCGGAGGCA |
| | | TGTAGACCCGCAGCTGGTGGGGCCGTGCATACCCGGGGTCTTGACTTCGCC |
| | | TGCGATATCTACATTTGGGCCCCTCTGGCTGGTACTTGCGGGGTCCTGCTG |
| | | CTTTCACTCGTGATCACTCTTTACTGTAAGCGCGGTCGGAAGAAGCTGCTG |
| | | TACATCTTTAAGCAACCCTTCATGAGGCCTGTGCAGACTACTCAAGAGGAG |
| | | GACGGCTGTTCATGCCGGTTCCCAGAGGAGGAGGAAGGCGGCTGCGAACTG |
| | | CGCGTGAAATTCAGCCGCAGCGCAGATGCTCCAGCCTACAAGCAGGGGCAG |
| | | AACCAGCTCTACAACGAACTCAATCTTGGTCGGAGAGAGGAGTACGACGTG |
| | | CTGGACAAGCGGAGAGGACGGGACCCAGAAATGGGCGGGAAGCCGCGCAGA |
| | | AAGAATCCCCAAGAGGGCCTGTACAACGAGCTCCAAAAGGATAAGATGGCA |
| | | GAAGCCTATAGCGAGATTGGTATGAAAGGGGAACGCAGAAGAGGCAAAGGC |
| | | CACGACGGACTGTACCAGGGACTCAGCACCGCCACCAAGGACACCTATGAC |
| | | GCTCTTCACATGCAGGCCCTGCCGCCTCGG |

BCMA_EBB-C1978-A10

| | | |
|---|---|---|
| BCMA EBB- | 895 | MALPVTALLLPLALLLHAARPEVQLVETGGGLVQPGGSLRLSCAASGFTFS |
| C1978-A10- | | SYAMSWVRQAPGKGLEWVSAISGSGGSTYYADSVKGRFTMSRENDKNSVFL |
| aa | | QMNSLRVEDTGVYYCARANYKRELRYYYGMDVWGQGTMVTVSSGGGGSGGG |
| Full CAR | | GSGGGGSEIVMTQSPGTLSLSPGESATLSCRASQRVASNYLAWYQHKPGQA |
| | | PSLLISGASSRATGVPDRFSGSGSGTDFTLAISRLEPEDSAVYYCQHYDSS |
| | | PSWTFGQGTKVEIKTTTPAPRPPTPAPTIASQPLSLRPEACRPAAGGAVHT |
| | | RGLDFACDIYIWAPLAGTCGVLLLSLVITLYCKRGRKKLLYIFKQPFMRPV |
| | | QTTQEEDGCSCRFPEEEEGGCELRVKESRSADAPAYKQGQNQLYNELNLGR |
| | | REEYDVLDKRRGRDPEMGGKPRRKNPQEGLYNELQKDKMAEAYSEIGMKGE |
| | | RRRGKGHDGLYQGLSTATKDTYDALHMQALPPR |
| BCMA EBB- | 917 | ATGGCCCTCCCTGTCACCGCCCTGCTGCTTCCGCTGGCTCTTCTGCTCCAC |
| C1978-A10- | | GCCGCTCGGCCCGAAGTGCAACTGGTGGAAACCGGTGGAGGACTCGTGCAG |
| nt | | CCTGGCGGCAGCCTCCGGCTGAGCTGCGCCGCTTCGGGATTCACCTTTTCC |
| Full CAR | | TCCTACGCGATGTCTTGGGTCAGACAGGCCCCCGGAAAGGGGCTGGAATGG |
| | | GTGTCAGCCATCTCCGGCTCCGGCGGATCAACGTACTACGCCGACTCCGTG |
| | | AAAGGCCGGTTCACCATGTCGCGCGAGAATGACAAGAACTCCGTGTTCCTG |
| | | CAAATGAACTCCCTGAGGGTGGAGGACACCGGAGTGTACTATTGTGCGCGC |
| | | GCCAACTACAAGAGAGAGCTGCGGTACTACTACGGAATGGACGTCTGGGGA |
| | | CAGGGAACTATGGTGACCGTGTCATCCGGTGGAGGGGGAAGCGGCGGTGGA |
| | | GGCAGCGGGGGCGGGGGTTCAGAAATTGTCATGACCCAGTCCCCGGGAACT |
| | | CTTTCCCTCTCCCCCGGGGAATCCGCGACTTTGTCCTGCCGGGCCAGCCAG |
| | | CGCGTGGCCTCGAACTACCTCGCATGGTACCAGCATAAGCCAGGCCAAGCC |
| | | CCTTCCCTGCTGATTTCCGGGGCTAGCAGCCGCGCCACTGGCGTGCCGGAT |
| | | AGGTTCTCGGGAAGCGGCTCGGGTACCGATTTCACCCTGGCAATCTCGCGG |
| | | CTGGAACCGGAGGATTCGGCCGTGTACTACTGCCAGCACTATGACTCATCC |
| | | CCCTCCTGGACATTCGGACAGGGCACCAAGGTCGAGATCAAGACCACTACC |
| | | CCAGCACCGAGGCCACCCACCCCGGCTCCTACCATCGCCTCCCAGCCTCTG |
| | | TCCCTGCGTCCGGAGGCATGTAGACCCGCAGCTGGTGGGGCCGTGCATACC |
| | | CGGGGTCTTGACTTCGCCTGCGATATCTACATTTGGGCCCCTCTGGCTGGT |
| | | ACTTGCGGGGTCCTGCTGCTTTCACTCGTGATCACTCTTTACTGTAAGCGC |
| | | GGTCGGAAGAAGCTGCTGTACATCTTTAAGCAACCCTTCATGAGGCCTGTG |
| | | CAGACTACTCAAGAGGAGGACGGCTGTTCATGCCGGTTCCCAGAGGAGGAG |
| | | GAAGGCGGCTGCGAACTGCGCGTGAAATTCAGCCGCAGCGCAGATGCTCCA |
| | | GCCTACAAGCAGGGGCAGAACCAGCTCTACAACGAACTCAATCTTGGTCGG |
| | | AGAGAGGAGTACGACGTGCTGGACAAGCGGAGAGGACGGGACCCAGAAATG |
| | | GGCGGGAAGCCGCGCAGAAAGAATCCCCAAGAGGGCCTGTACAACGAGCTC |
| | | CAAAAGGATAAGATGGCAGAAGCCTATAGCGAGATTGGTATGAAAGGGGAA |
| | | CGCAGAAGAGGCAAAGGCCACGACGGACTGTACCAGGGACTCAGCACCGCC |
| | | ACCAAGGACACCTATGACGCTCTTCACATGCAGGCCCTGCCGCCTCGG |

BCMA_EBB-C1978-D4

| | | |
|---|---|---|
| BCMA EBB- | 896 | MALPVTALLLPLALLLHAARPEVQLLETGGGLVQPGGSLRLSCAASGFSFS |
| C1978-D4- | | SYAMSWVRQAPGKGLEWVSAISGSGGSTYYADSVKGRFTISRDNSKNTLYL |
| aa | | QMNSLRAEDTAVYYCAKALVGATGAFDIWGQGTLVTVSSGGGGSGGGGSGG |
| Full CAR | | GGSEIVLTQSPGTLSLSPGERATLSCRASQSLSSNFLAWYQQKPGQAPGLL |
| | | IYGASNWATGTPDRFSGSGSGTDFTLTITRLEPEDFAVYYCQYYGTSPMYT |
| | | FGQGTKVEIKTTTPAPRPPTPAPTIASQPLSLRPEACRPAAGGAVHTRGLD |
| | | FACDIYIWAPLAGTCGVLLLSLVITLYCKRGRKKLLYIFKQPFMRPVQTTQ |
| | | EEDGCSCRFPEEEEGGCELRVKESRSADAPAYKQGQNQLYNELNLGRREEY |
| | | DVLDKRRGRDPEMGGKPRRKNPQEGLYNELQKDKMAEAYSEIGMKGERRRG |
| | | KGHDGLYQGLSTATKDTYDALHMQALPPR |
| BCMA EBB- | 918 | ATGGCCCTCCCTGTCACCGCCCTGCTGCTTCCGCTGGCTCTTCTGCTCCAC |
| C1978-D4- | | GCCGCTCGGCCCGAAGTGCAGCTGCTCGAAACCGGTGGAGGGCTGGTGCAG |
| nt | | CCAGGGGGCTCCCTGAGGCTTTCATGCGCCGCTAGCGGATTCTCCTTCTCC |
| Full CAR | | TCTTACGCCATGTCGTGGGTCCGCCAAGCCCCTGGAAAAGGCCTGGAATGG |
| | | GTGTCCGCGATTTCCGGGAGCGGAGGTTCGACCTATTACGCCGACTCCGTG |
| | | AAGGGCCGCTTTACCATCTCCCGGGATAACTCCAAGAACACTCTGTACCTC |
| | | CAAATGAACTCGCTGAGAGCCGAGGACACCGCCGTGTATTACTGCGCGAAG |
| | | GCGCTGGTCGGCGCGACTGGGGCATTCGACATCTGGGGACAGGGAACTCTT |
| | | GTGACCGTGTCGAGCGGAGGCGGCGGCTCCGGCGGAGGAGGGAGCGGGGGC |
| | | GGTGGTTCCGAAATCGTGTTGACTCAGTCCCCGGGAACCCTGAGCTTGTCA |
| | | CCCGGGGAGCGGGCCACTCTCTCCTGTCGCGCCTCCCAATCGCTCTCATCC |
| | | AATTTCCTGGCCTGGTACCAGCAGAAGCCCGGACAGGCCCCGGGCCTGCTC |
| | | ATCTACGGCGCTTCAAACTGGGCAACGGGAACCCCTGATCGGTTCAGCGGA |
| | | AGCGGATCGGGTACTGACTTTACCCTGACCATCACCAGACTGGAACCGGAG |
| | | GACTTCGCCGTGTACTACTGCCAGTACTACGGCACCTCCCCCATGTACACA |
| | | TTCGGACAGGGTACCAAGGTCGAGATTAAGACCACTACCCCAGCACCGAGG |
| | | CCACCCACCCCGGCTCCTACCATCGCCTCCCAGCCTCTGTCCCTGCGTCCG |
| | | GAGGCATGTAGACCCGCAGCTGGTGGGGCCGTGCATACCCGGGGTCTTGAC |
| | | TTCGCCTGCGATATCTACATTTGGGCCCCTCTGGCTGGTACTTGCGGGGTC |
| | | CTGCTGCTTTCACTCGTGATCACTCTTTACTGTAAGCGCGGTCGGAAGAAG |
| | | CTGCTGTACATCTTTAAGCAACCCTTCATGAGGCCTGTGCAGACTACTCAA |
| | | GAGGAGGACGGCTGTTCATGCCGGTTCCCAGAGGAGGAGGAAGGCGGCTGC |
| | | GAACTGCGCGTGAAATTCAGCCGCAGCGCAGATGCTCCAGCCTACAAGCAG |
| | | GGGCAGAACCAGCTCTACAACGAACTCAATCTTGGTCGGAGAGAGGAGTAC |
| | | GACGTGCTGGACAAGCGGAGAGGACGGGACCCAGAAATGGGCGGGAAGCCG |
| | | CGCAGAAAGAATCCCCAAGAGGGCCTGTACAACGAGCTCCAAAAGGATAAG |
| | | ATGGCAGAAGCCTATAGCGAGATTGGTATGAAAGGGGAACGCAGAAGAGGC |
| | | AAAGGCCACGACGGACTGTACCAGGGACTCAGCACCGCCACCAAGGACACC |
| | | TATGACGCTCTTCACATGCAGGCCCTGCCGCCTCGG |

BCMA_EBB-C1980-A2

| | | |
|---|---|---|
| BCMA EBB- | 897 | MALPVTALLLPLALLLHAARPEVQLLESGGGLVQPGGSLRLSCAASGFTFS |
| C1980-A2- | | SYAMSWVRQAPGKGLEWVSAISGSGGSTYYADSVKGRFTISRDNSKNTLYL |
| aa | | QMNSLRAEDTAVYYCVLWFGEGFDPWGQGTLVTVSSGGGGSGGGGSGGGGS |
| Full CAR | | DIVLTQSPLSLPVTPGEPASISCRSSQSLLHSNGYNYLDWYLQKPGQSPQL |
| | | LIYLGSNRASGVPDRFSGSGSGTDFTLKISRVEAEDVGVYYCMQALQTPLT |
| | | FGGGTKVDIKTTTPAPRPPTPAPTIASQPLSLRPEACRPAAGGAVHTRGLD |
| | | FACDIYIWAPLAGTCGVLLLSLVITLYCKRGRKKLLYIFKQPFMRPVQTTQ |
| | | EEDGCSCRFPEEEEGGCELRVKESRSADAPAYKQGQNQLYNELNLGRREEY |
| | | DVLDKRRGRDPEMGGKPRRKNPQEGLYNELQKDKMAEAYSEIGMKGERRRG |
| | | KGHDGLYQGLSTATKDTYDALHMQALPPR |
| BCMA EBB- | 919 | ATGGCCCTCCCTGTCACCGCCCTGCTGCTTCCGCTGGCTCTTCTGCTCCAC |
| C1980-A2- | | GCCGCTCGGCCCGAAGTGCAGCTGCTTGAGAGCGGTGGAGGTCTGGTGCAG |
| nt | | CCCGGGGGATCACTGCGCCTGTCCTGTGCCGCGTCCGGTTTCACTTTCTCC |
| Full CAR | | TCGTACGCCATGTCGTGGGTCAGACAGGCACCGGGAAAGGGACTGGAATGG |
| | | GTGTCAGCCATTTCGGGTTCGGGGGGCAGCACCTACTACGCTGACTCCGTG |
| | | AAGGGCCGGTTCACCATTTCCCGCGACAACTCCAAGAACACCTTGTACCTC |
| | | CAAATGAACTCCCTGCGGGCCGAAGATACCGCCGTGTATTACTGCGTGCTG |
| | | TGGTTCGGAGAGGGATTCGACCCGTGGGGACAAGGAACACTCGTGACTGTG |
| | | TCATCCGGCGGAGGCGGCAGCGGTGGCGGCGGTTCCGGCGGCGGCGGATCT |
| | | GACATCGTGTTGACCCAGTCCCCTCTGAGCCTGCCGGTCACTCCTGGCGAA |
| | | CCAGCCAGCATCTCCTGCCGGTCGAGCCAGTCCCTCCTGCACTCCAATGGG |
| | | TACAACTACCTCGATTGGTATCTGCAAAAGCCGGGCCAGAGCCCCCAGCTG |
| | | CTGATCTACCTTGGGTCAAACCGCGCTTCCGGGGTGCCTGATAGATTCTCC |
| | | GGGTCCGGGAGCGGAACCGACTTTACCCTGAAAATCTCGAGGGTGGAGGCC |
| | | GAGGACGTCGGAGTGTACTACTGCATGCAGGCGCTCCAGACTCCCCTGACC |
| | | TTCGGAGGAGGAACGAAGGTCGACATCAAGACCACTACCCCAGCACCGAGG |
| | | CCACCCACCCCGGCTCCTACCATCGCCTCCCAGCCTCTGTCCCTGCGTCCG |
| | | GAGGCATGTAGACCCGCAGCTGGTGGGGCCGTGCATACCCGGGGTCTTGAC |
| | | TTCGCCTGCGATATCTACATTTGGGCCCCTCTGGCTGGTACTTGCGGGGTC |
| | | CTGCTGCTTTCACTCGTGATCACTCTTTACTGTAAGCGCGGTCGGAAGAAG |
| | | CTGCTGTACATCTTTAAGCAACCCTTCATGAGGCCTGTGCAGACTACTCAA |
| | | GAGGAGGACGGCTGTTCATGCCGGTTCCCAGAGGAGGAGGAAGGCGGCTGC |
| | | GAACTGCGCGTGAAATTCAGCCGCAGCGCAGATGCTCCAGCCTACAAGCAG |
| | | GGGCAGAACCAGCTCTACAACGAACTCAATCTTGGTCGGAGAGAGGAGTAC |
| | | GACGTGCTGGACAAGCGGAGAGGACGGGACCCAGAAATGGGCGGGAAGCCG |
| | | CGCAGAAAGAATCCCCAAGAGGGCCTGTACAACGAGCTCCAAAAGGATAAG |
| | | ATGGCAGAAGCCTATAGCGAGATTGGTATGAAAGGGGAACGCAGAAGAGGC |
| | | AAAGGCCACGACGGACTGTACCAGGGACTCAGCACCGCCACCAAGGACACC |
| | | TATGACGCTCTTCACATGCAGGCCCTGCCGCCTCGG |

BCMA_EBB-C1981-C3

| | | |
|---|---|---|
| BCMA EBB- | 898 | MALPVTALLLPLALLLHAARPQVQLVESGGGLVQPGGSLRLSCAASGFTFS |
| C1981-C3- | | SYAMSWVRQAPGKGLEWVSAISGSGGSTYYADSVKGRFTISRDNSKNTLYL |
| aa | | QMNSLRAEDTAVYYCAKVGYDSSGYYRDYYGMDVWGQGTTVTVSSGGGGSG |
| Full CAR | | GGGSGGGGSEIVLTQSPGTLSLSPGERATLSCRASQSVSSSYLAWYQQKPG |
| | | QAPRLLIYGTSSRATGISDRFSGSGSGTDFTLTISRLEPEDFAVYYCQHYG |
| | | NSPPKFTFGPGTKLEIKTTTPAPRPPTPAPTIASQPLSLRPEACRPAAGGA |
| | | VHTRGLDFACDIYIWAPLAGTCGVLLLSLVITLYCKRGRKKLLYIFKQPEM |
| | | RPVQTTQEEDGCSCRFPEEEEGGCELRVKESRSADAPAYKQGQNQLYNELN |
| | | LGRREEYDVLDKRRGRDPEMGGKPRRKNPQEGLYNELQKDKMAEAYSEIGM |
| | | KGERRRGKGHDGLYQGLSTATKDTYDALHMQALPPR |
| BCMA EBB- | 920 | ATGGCCCTCCCTGTCACCGCCCTGCTGCTTCCGCTGGCTCTTCTGCTCCAC |
| C1981-C3- | | GCCGCTCGGCCCCAAGTGCAGCTCGTGGAGTCAGGCGGAGGACTGGTGCAG |
| nt | | CCCGGGGGCTCCCTGAGACTTTCCTGCGCGGCATCGGGTTTTACCTTCTCC |
| Full CAR | | TCCTATGCTATGTCCTGGGTGCGCCAGGCCCCGGGAAAGGGACTGGAATGG |
| | | GTGTCCGCAATCAGCGGTAGCGGGGGCTCAACATACTACGCCGACTCCGTC |
| | | AAGGGTCGCTTCACTATTTCCCGGGACAACTCCAAGAATACCCTGTACCTC |
| | | CAAATGAACAGCCTCAGGGCCGAGGATACTGCCGTGTACTACTGCGCCAAA |
| | | GTCGGATACGATAGCTCCGGTTACTACCGGGACTACTACGGAATGGACGTG |
| | | TGGGGACAGGGCACCACCGTGACCGTGTCAAGCGGCGGAGGCGGTTCAGGA |
| | | GGGGGAGGCTCCGGCGGTGGAGGGTCCGAAATCGTCCTGACTCAGTCGCCT |
| | | GGCACTCTGTCGTTGTCCCCGGGGGAGCGCGCTACCCTGTCGTGTCGGGCG |
| | | TCGCAGTCCGTGTCGAGCTCCTACCTCGCGTGGTACCAGCAGAAGCCCGGA |
| | | CAGGCCCCTAGACTTCTGATCTACGGCACTTCTTCACGCGCCACCGGGATC |
| | | AGCGACAGGTTCAGCGGCTCCGGCTCCGGGACCGACTTCACCCTGACCATT |
| | | AGCCGGCTGGAGCCTGAAGATTTCGCCGTGTATTACTGCCAACACTACGGA |
| | | AACTCGCCGCCAAAGTTCACGTTCGGACCCGGAACCAAGCTGGAAATCAAG |
| | | ACCACTACCCCAGCACCGAGGCCACCCACCCCGGCTCCTACCATCGCCTCC |
| | | CAGCCTCTGTCCCTGCGTCCGGAGGCATGTAGACCCGCAGCTGGTGGGGCC |
| | | GTGCATACCCGGGGTCTTGACTTCGCCTGCGATATCTACATTTGGGCCCCT |
| | | CTGGCTGGTACTTGCGGGGTCCTGCTGCTTTCACTCGTGATCACTCTTTAC |
| | | TGTAAGCGCGGTCGGAAGAAGCTGCTGTACATCTTTAAGCAACCCTTCATG |
| | | AGGCCTGTGCAGACTACTCAAGAGGAGGACGGCTGTTCATGCCGGTTCCCA |
| | | GAGGAGGAGGAAGGCGGCTGCGAACTGCGCGTGAAATTCAGCCGCAGCGCA |
| | | GATGCTCCAGCCTACAAGCAGGGGCAGAACCAGCTCTACAACGAACTCAAT |
| | | CTTGGTCGGAGAGAGGAGTACGACGTGCTGGACAAGCGGAGAGGACGGGAC |
| | | CCAGAAATGGGCGGGAAGCCGCGCAGAAAGAATCCCCAAGAGGGCCTGTAC |
| | | AACGAGCTCCAAAAGGATAAGATGGCAGAAGCCTATAGCGAGATTGGTATG |
| | | AAAGGGGAACGCAGAAGAGGCAAAGGCCACGACGGACTGTACCAGGGACTC |
| | | AGCACCGCCACCAAGGACACCTATGACGCTCTTCACATGCAGGCCCTGCCG |
| | | CCTCGG |

BCMA_EBB-C1978-G4

| | | |
|---|---|---|
| BCMA EBB- | 899 | MALPVTALLLPLALLLHAARPEVQLVESGGGLVQPGGSLRLSCAASGFTFS |
| C1978-G4- | | SYAMSWVRQAPGKGLEWVSAISGSGGSTYYADSVKGRFTISRDNSKNTLYL |
| aa | | QMNSLRAEDTAVYYCAKMGWSSGYLGAFDIWGQGTTVTVSSGGGGSGGGGS |
| Full CAR | | GGGGSEIVLTQSPGTLSLSPGERATLSCRASQSVASSFLAWYQQKPGQAPR |
| | | LLIYGASGRATGIPDRFSGSGSGTDFTLTISRLEPEDFAVYYCQHYGGSPR |
| | | LTFGGGTKVDIKTTTPAPRPPTPAPTIASQPLSLRPEACRPAAGGAVHTRG |
| | | LDFACDIYIWAPLAGTCGVLLLSLVITLYCKRGRKKLLYIFKQPEMRPVQT |
| | | TQEEDGCSCRFPEEEEGGCELRVKESRSADAPAYKQGQNQLYNELNLGRRE |
| | | EYDVLDKRRGRDPEMGGKPRRKNPQEGLYNELQKDKMAEAYSEIGMKGERR |
| | | RGKGHDGLYQGLSTATKDTYDALHMQALPPR |
| BCMA EBB- | 921 | ATGGCCCTCCCTGTCACCGCCCTGCTGCTTCCGCTGGCTCTTCTGCTCCAC |
| C1978-G4- | | GCCGCTCGGCCCGAAGTCCAACTGGTGGAGTCCGGGGGAGGGCTCGTGCAG |
| nt | | CCCGGAGGCAGCCTTCGGCTGTCGTGCGCCGCCTCCGGGTTCACGTTCTCA |
| Full CAR | | TCCTACGCGATGTCGTGGGTCAGACAGGCACCAGGAAAGGGACTGGAATGG |
| | | GTGTCCGCCATTAGCGGCTCCGGCGGTAGCACCTACTATGCCGACTCAGTG |
| | | AAGGGAAGGTTCACTATCTCCCGCGACAACAGCAAGAACACCCTGTACCTC |
| | | CAAATGAACTCTCTGCGGGCCGAGGATACCGCGGTGTACTATTGCGCCAAG |
| | | ATGGGTTGGTCCAGCGGATACTTGGGAGCCTTCGACATTTGGGGACAGGGC |
| | | ACTACTGTGACCGTGTCCTCCGGGGGTGGCGGATCGGGAGGCGGCGGCTCG |
| | | GGTGGAGGGGGTTCCGAAATCGTGTTGACCCAGTCACCGGGAACCCTCTCG |
| | | CTGTCCCCGGGAGAACGGGCTACACTGTCATGTAGAGCGTCCCAGTCCGTG |
| | | GCTTCCTCGTTCCTGGCCTGGTACCAGCAGAAGCCGGGACAGGCACCCCGC |
| | | CTGCTCATCTACGGAGCCAGCGGCCGGGCGACCGGCATCCCTGACCGCTTC |
| | | TCCGGTTCCGGCTCGGGCACCGACTTTACTCTGACCATTAGCAGGCTTGAG |
| | | CCCGAGGATTTTGCCGTGTACTACTGCCAACACTACGGGGGGAGCCCTCGC |
| | | CTGACCTTCGGAGGCGGAACTAAGGTCGATATCAAAACCACTACCCCAGCA |
| | | CCGAGGCCACCCACCCCGGCTCCTACCATCGCCTCCCAGCCTCTGTCCCTG |
| | | CGTCCGGAGGCATGTAGACCCGCAGCTGGTGGGGCCGTGCATACCCGGGGT |
| | | CTTGACTTCGCCTGCGATATCTACATTTGGGCCCCTCTGGCTGGTACTTGC |
| | | GGGGTCCTGCTGCTTTCACTCGTGATCACTCTTTACTGTAAGCGCGGTCGG |
| | | AAGAAGCTGCTGTACATCTTTAAGCAACCCTTCATGAGGCCTGTGCAGACT |
| | | ACTCAAGAGGAGGACGGCTGTTCATGCCGGTTCCCAGAGGAGGAGGAAGGC |
| | | GGCTGCGAACTGCGCGTGAAATTCAGCCGCAGCGCAGATGCTCCAGCCTAC |
| | | AAGCAGGGGCAGAACCAGCTCTACAACGAACTCAATCTTGGTCGGAGAGAG |
| | | GAGTACGACGTGCTGGACAAGCGGAGAGGACGGGACCCAGAAATGGGCGGG |
| | | AAGCCGCGCAGAAAGAATCCCCAAGAGGGCCTGTACAACGAGCTCCAAAAG |
| | | GATAAGATGGCAGAAGCCTATAGCGAGATTGGTATGAAAGGGGAACGCAGA |
| | | AGAGGCAAAGGCCACGACGGACTGTACCAGGGACTCAGCACCGCCACCAAG |
| | | GACACCTATGACGCTCTTCACATGCAGGCCCTGCCGCCTCGG |

[0581] In one embodiment, the CAR molecule comprises (or consists of) an amino acid sequence provided in Table 13, or Table 1 of WO2016/014565, or as otherwise described herein. In one embodiment, the CAR molecule comprises (or consists of) an amino acid sequence of SEQ ID NO: 849, SEQ ID NO: 850, SEQ ID NO: 851, SEQ ID NO: 852, SEQ ID NO: 853, SEQ ID NO: 854, SEQ ID NO: 855, SEQ ID NO: 856, SEQ ID NO: 857, SEQ ID NO: 858, SEQ ID NO: 859, SEQ ID NO: 860, SEQ ID NO: 861, SEQ ID NO: 862, SEQ ID NO: 863, SEQ ID NO: 879, SEQ ID NO: 880, SEQ ID NO: 881, SEQ ID NO: 882, SEQ ID NO: 883, SEQ ID NO: 884, SEQ ID NO: 885, SEQ ID NO: 886, SEQ ID NO: 887, SEQ ID NO: 888, SEQ ID NO: 889, SEQ ID NO: 890, SEQ ID NO: 891, SEQ ID NO: 892, SEQ ID NO: 893, SEQ ID NO: 894, SEQ ID NO: 895, SEQ ID NO: 896, SEQ ID NO: 897, SEQ ID NO: 898, or SEQ ID NO: 899; or an amino acid sequence having at least one, two, three, four, five, 10, 15, 20 or 30 modifications (e.g., substitutions, e.g., conservative substitutions) but not more than 60, 50, or 40 modifications (e.g., substitutions, e.g., conservative substitutions) of an amino acid sequence of SEQ ID NO: 849, SEQ ID NO: 850, SEQ ID NO: 851, SEQ ID NO: 852, SEQ ID NO: 853, SEQ ID NO: 854, SEQ ID NO: 855, SEQ ID NO: 856, SEQ ID NO: 857, SEQ ID NO: 858, SEQ ID NO: 859, SEQ ID NO: 860, SEQ ID NO: 861, SEQ ID NO: 862, SEQ ID NO: 863, SEQ ID NO: 879, SEQ ID NO: 880, SEQ ID NO: 881, SEQ ID NO: 882, SEQ ID NO: 883, SEQ ID NO: 884, SEQ ID NO: 885, SEQ ID NO: 886, SEQ ID NO: 887, SEQ ID NO: 888, SEQ ID NO: 889, SEQ ID NO: 890, SEQ ID NO: 891, SEQ ID NO: 892, SEQ ID NO: 893, SEQ ID NO: 894, SEQ ID NO: 895, SEQ ID NO: 896, SEQ ID NO: 897, SEQ ID NO: 898, or SEQ ID NO: 899; or an amino acid sequence having 85%, 90%, 95%, 96%, 97%, 98%, 99% identity to an amino acid sequence of SEQ ID NO: 849, SEQ ID NO: 850, SEQ ID NO: 851, SEQ ID NO: 852, SEQ ID NO: 853, SEQ ID NO: 854, SEQ ID NO: 855, SEQ ID NO: 856, SEQ ID NO: 857, SEQ ID NO: 858, SEQ ID NO: 859, SEQ ID NO: 860, SEQ ID NO: 861, SEQ ID NO: 862, SEQ ID NO: 863, SEQ ID NO: 879, SEQ ID NO: 880, SEQ ID NO: 881, SEQ ID NO: 882, SEQ ID NO: 883, SEQ ID NO: 884, SEQ ID NO: 885, SEQ ID NO: 886, SEQ ID NO: 887, SEQ ID NO: 888, SEQ ID NO: 889, SEQ ID NO: 890, SEQ ID NO: 891, SEQ ID NO: 892, SEQ ID NO: 893, SEQ ID NO: 894, SEQ ID NO: 895, SEQ ID NO: 896, SEQ ID NO: 897, SEQ ID NO: 898, or SEQ ID NO: 899.

### Transmembrane Domains

[0582] With respect to the transmembrane domain, in various embodiments, a CAR can be designed to comprise a transmembrane domain that is attached to the extracellular domain of the CAR, e.g., attached to any of the antigen binding domains listed above. The transmembrane domain can also, in some embodiments, be attached to an intracellular domain of the CAR (e.g., a costimulatory and/or primary signalling domain). A transmembrane domain can include one or more additional amino acids adjacent to the transmembrane region, e.g., one or more amino acid associated with the extracellular region of the protein from which the transmembrane was derived (e.g., 1, 2, 3, 4, 5, 6, 7, 8, 9, 10 up to 15 amino acids of the extracellular region) and/or one or more additional amino acids associated with the intracellular region of the protein from which the transmembrane protein is derived (e.g., 1, 2, 3, 4, 5, 6, 7, 8, 9, 10 up to 15 amino acids of the intracellular region). In one aspect, the transmembrane domain is one that is associated with one of the other domains of the CAR e.g., in one embodiment, the transmembrane domain may be from the same protein that the signaling domain, costimulatory domain or the hinge domain is derived from. In another aspect, the transmembrane domain is not derived from the same protein that any other domain of the CAR is derived from. In some instances, the transmembrane domain can be selected or modified by amino acid substitution to avoid binding of such domains to the transmembrane domains of the same or different surface membrane proteins, e.g., to minimize interactions with other members of the receptor complex. In one aspect, the transmembrane domain is capable of homodimerization with another CAR on the cell surface of a CAR-expressing cell. In a different aspect, the amino acid sequence of the transmembrane domain may be modified or substituted so as to minimize interactions with the binding domains of the native binding partner present in the same CAR-expressing cell.

[0583] The transmembrane domain may be derived either from a natural or from a recombinant source. Where the source is natural, the domain may be derived from any membrane-bound or transmembrane protein. In one aspect the transmembrane domain is capable of signaling to the intracellular domain(s) whenever the CAR has bound to a target. A transmembrane domain of particular use in this disclosure may include at least the transmembrane region(s) of e.g., the alpha, beta or zeta chain of the T-cell receptor, CD28, CD27, CD3 epsilon, CD45, CD4, CD5, CD8, CD9, CD16, CD22, CD33, CD37, CD64, CD80, CD86, CD134, CD137, CD154. In some embodiments, a transmembrane domain may include at least the transmembrane region(s) of, e.g., KIRDS2, OX40, CD2, CD27, LFA-1 (CD11a, CD18), ICOS (CD278), 4-1BB (CD137), GITR, CD40, BAFFR, HVEM (LIGHTR), SLAMF7, NKp80 (KLRF1), NKp44, NKp30, NKp46, CD160, CD19, IL2R beta, IL2R gamma, IL7R α, ITGA1, VLA1, CD49a, ITGA4, IA4, CD49D, ITGA6, VLA-6, CD49f, ITGAD, CD11d, ITGAE, CD103, ITGAL, CD11a, LFA-1, ITGAM, CD11b, ITGAX, CD11c, ITGB1, CD29, ITGB2, CD18, LFA-1, ITGB7, TNFR2, DNAMI (CD226), SLAMF4 (CD244, 2B4), CD84, CD96 (Tactile), CEACAM1, CRTAM, Ly9 (CD229), CD160 (BY55), PSGL1, CD100 (SEMA4D), SLAMF6 (NTB-A, Ly108), SLAM (SLAMF1, CD150, IPO-3), BLAME (SLAMF8), SELPLG (CD162), LTBR, PAG/Cbp, NKG2D, NKG2C, or atransmembrane domain derived from any protein thereof.

[0584] In some instances, the transmembrane domain can be attached to the extracellular region of the CAR, e.g., the antigen binding domain of the CAR, via a hinge, e.g., a hinge from a human protein. For example, in one embodiment, the hinge can be a human Ig (immunoglobulin) hinge (e.g., an IgG4 hinge, an IgD hinge), a GS linker (e.g., a GS linker described herein), a KIR2DS2 hinge or a CD8a hinge. In one embodiment, the hinge or spacer comprises (or consists of) the amino acid sequence of SEQ ID NO: 5. In one aspect, the transmembrane domain comprises (or consists of) a transmembrane domain of SEQ ID NO: 13.

[0585] In certain embodiments, the encoded transmembrane domain comprises an amino acid sequence of a CD8 transmembrane domain having at least one, two or three modifications but not more than 20, 10 or 5 modifications of an amino acid sequence of SEQ ID NO: 13, or a sequence with 95-99% identity to an amino acid sequence of SEQ ID NO: 13. In one embodiment, the encoded transmembrane domain comprises the sequence of SEQ ID NO: 13.

[0586] In other embodiments, the nucleic acid molecule encoding the CAR comprises a nucleotide sequence of a CD8 transmembrane domain, e.g., comprising the sequence of SEQ ID NO: 14, or a sequence with 95-99% identity thereof.

[0587] In certain embodiments, the encoded antigen binding domain is connected to the transmembrane domain by a hinge region. In one embodiment, the encoded hinge region comprises the amino acid sequence of a CD8 hinge, e.g., SEQ ID NO: 5; or the amino acid sequence of an IgG4 hinge, e.g., SEQ ID NO: 7, or a sequence with 95-99% identity to SEQ ID NO: 5 or 7. In other embodiments, the nucleic acid sequence encoding the hinge region comprises a sequence of SEQ ID NO: 6 or SEQ ID NO: 8, corresponding to a CD8 hinge or an IgG4 hinge, respectively, or a sequence with 95-99% identity to SEQ ID NO:6 or 8.

[0588] In one aspect, the hinge or spacer comprises an IgG4 hinge. For example, in one embodiment, the hinge or spacer comprises a hinge of the amino acid sequence ESKYGPPCPPCPAPEFLGGPSVFLFPPKPKDTLMISRTPEVTCVVVDVSQEDPEVQFNW YVDGVEVHNAKTKPREEQFNSTYRVVSVLTVLHQDWLNGKEYKCKVSNKGLPSSIEK TISKAKGQPREPQVYTLPPSQEEMTKNQVSLTCLVKGFYPSDIAVEWESNGQPENNYK TTPPVLDSDGSFFLYSRLTVDKSRWQEGNVFSCSVMHEALHNHYTQKSLSLSLGKM (SEQ ID NO:7). In some embodiments, the hinge or spacer comprises a hinge encoded by a nucleotide sequence of

(SEQ ID NO: 8)
GAGAGCAAGTACGGCCCTCCCTGCCCCCCTTGCCCTGCCCCCGAGTTCCT
GGGCGGACCCAGCGTGTTCCTGTTCCCCCCCAAGCCCAAGGACACCCTGA
TGATCAGCCGGACCCCCGAGGTGACCTGTGTGGTGGTGGACGTGTCCCAG
GAGGACCCCGAGGTCCAGTTCAACTGGTACGTGGACGGCGTGGAGGTGCA
CAACGCCAAGACCAAGCCCCGGGAGGAGCAGTTCAATAGCACCTACCGGG
TGGTGTCCGTGCTGACCGTGCTGCACCAGGACTGGCTGAACGGCAAGGAA
TACAAGTGTAAGGTGTCCAACAAGGGCCTGCCCAGCAGCATCGAGAAAAC
CATCAGCAAGGCCAAGGGCCAGCCTCGGGAGCCCCAGGTGTACACCCTGC
CCCCTAGCCAAGAGGAGATGACCAAGAACCAGGTGTCCCTGACCTGCCTG
GTGAAGGGCTTCTACCCCAGCGACATCGCCGTGGAGTGGGAGAGCAACGG
CCAGCCCGAGAACAACTACAAGACCACCCCCCCTGTGCTGGACAGCGACG
GCAGCTTCTTCCTGTACAGCCGGCTGACCGTGGACAAGAGCCGGTGGCAG
GAGGGCAACGTCTTTAGCTGCTCCGTGATGCACGAGGCCCTGCACAACCA
CTACACCCAGAAGAGCCTGAGCCTGTCCCTGGGCAAGATG.

[0589] In one aspect, the hinge or spacer comprises an IgD hinge. For example, in one embodiment, the hinge or spacer comprises a hinge of the amino acid sequence RWPESPKAQASSVPTAQPQAEGSLAKATTAPATTRNTGRGGEEKKKEKEKEEQEERE TKTPECPSHTQPLGVYLLTPAVQDLWLRDKATFTCFVVGSDLKDAHLTWEVAGKVPT GGVEEGLLERHSNGSQSQHSRLTLPRSLWNAGTSVTCTLNHPSLPPQRLMALREPAAQ APVKLSLNLLASSDPPEAASWLLCEVSGFSPPNILLMWLEDQREVNTSGF APARPPPQP GSTTFWAWSVLRVPAPPSPQPATYTCVVSHEDSRTLLNASRSLEVSYVTDH (SEQ ID NO: 9). In some embodiments, the hinge or spacer comprises a hinge encoded by a nucleotide sequence of

(SEQ ID NO: 10)
AGGTGGCCCGAAAGTCCCAAGGCCCAGGCATCTAGTGTTCCTACTGCACA
GCCCCAGGCAGAAGGCAGCCTAGCCAAAGCTACTACTGCACCTGCCACTA
CGCGCAATACTGGCCGTGGCGGGGAGGAGAAGAAAAAGGAGAAAGAGAAA
GAAGAACAGGAAGAGAGGGAGACCAAGACCCCTGAATGTCCATCCCATAC
CCAGCCGCTGGGCGTCTATCTCTTGACTCCCGCAGTACAGGACTTGTGGC
TTAGAGATAAGGCCACCTTTACATGTTTCGTCGTGGGCTCTGACCTGAAG
GATGCCCATTTGACTTGGGAGGTTGCCGGAAAGGTACCCACAGGGGGGGT
TGAGGAAGGGTTGCTGGAGCGCCATTCCAATGGCTCTCAGAGCCAGCACT
CAAGACTCACCCTTCCGAGATCCCTGTGGAACGCCGGGACCTCTGTCACA
TGTACTCTAAATCATCCTAGCCTGCCCCCACAGCGTCTGATGGCCCTTAG
AGAGCCAGCCGCCCAGGCACCAGTTAAGCTTAGCCTGAATCTGCTCGCCA
GTAGTGATCCCCCAGAGGCCGCCAGCTGGCTCTTATGCGAAGTGTCCGGC
TTTAGCCCGCCCAACATCTTGCTCATGTGGCTGGAGGACCAGCGAGAAGT
GAACACCAGCGGCTTCGCTCCAGCCCGGCCCCCACCCCAGCCGGGTTCTA
CCACATTCTGGGCCTGGAGTGTCTTAAGGGTCCCAGCACCACCTAGCCCC
CAGCCAGCCACATACACCTGTGTTGTGTCCCATGAAGATAGCAGGACCCT
GCTAAATGCTTCTAGGAGTCTGGAGGTTTCCTACGTGACTGACCATT.

[0590] In one aspect, the transmembrane domain may be recombinant, in which case it will comprise predominantly hydrophobic residues such as leucine and valine. In one aspect a triplet of phenylalanine, tryptophan and valine can be found at each end of a recombinant transmembrane domain.

[0591] Optionally, a short oligo- or polypeptide linker, between 2 and 10 amino acids in length may form the linkage between the transmembrane domain and the cytoplasmic region of the CAR. A glycine-serine doublet provides a particularly suitable linker. For example, in one aspect, the linker comprises the amino acid sequence of GGGGSGGGGS (SEQ ID NO:11). In some embodiments, the linker is encoded by a nucleotide sequence of

(SEQ ID NO: 12)
GGTGGCGGAGGTTCTGGAGGTGGAGGTTCC.

[0592] In one aspect, the hinge or spacer comprises a KIR2DS2 hinge.

### Signaling Domains

[0593] In embodiments having an intracellular signaling domain, such a domain can contain, e.g., one or more of a primary signaling domain and/or a costimulatory signaling domain. In some embodiments, the intracellular signaling domain comprises a sequence encoding a primary signaling domain. In some embodiments, the intracellular signaling domain comprises a costimulatory signaling domain. In some embodiments, the intracellular signaling domain comprises a primary signaling domain and a costimulatory signaling domain.

[0594] The intracellular signaling sequences within the cytoplasmic portion of the CAR may be linked to each other in a random or specified order. Optionally, a short oligo- or polypeptide linker, for example, between 2 and 10 amino acids (e.g., 2, 3, 4, 5, 6, 7, 8, 9, or 10 amino acids) in length may form the linkage between intracellular signaling sequences. In one embodiment, a glycine-serine doublet can be used as a suitable linker. In one embodiment, a single amino acid, e.g., an alanine, a glycine, can be used as a suitable linker.

[0595] In one aspect, the intracellular signaling domain is designed to comprise two or more, e.g., 2, 3, 4, 5, or more, costimulatory signaling domains. In an embodiment, the two or more, e.g., 2, 3, 4, 5, or more, costimulatory signaling domains, are separated by a linker molecule, e.g., a linker molecule described herein. In one embodiment, the intracellular signaling domain comprises two costimulatory signaling domains. In some embodiments, the linker molecule is a glycine residue. In some embodiments, the linker is an alanine residue.

### Primary Signaling Domains

[0596] A primary signaling domain regulates primary activation of the TCR complex either in a stimulatory way, or in an inhibitory way. Primary intracellular signaling domains that act in a stimulatory manner may contain signaling motifs which are known as immunoreceptor tyrosine-based activation motifs or ITAMs.

[0597] Examples of ITAM containing primary intracellular signaling domains that are of particular use in the disclosure include those of CD3 zeta, common FcR gamma (FCER1G), Fc gamma RIIa, FcR beta (Fc Epsilon R1b), CD3 gamma, CD3 delta, CD3 epsilon, CD79a, CD79b, DAP10, and DAP12. In one embodiment, a CAR of the disclosure comprises an intracellular signaling domain, e.g., a primary signaling domain of CD3-zeta.

[0598] In one embodiment, the encoded primary signaling domain comprises a functional signaling domain of CD3 zeta. The encoded CD3 zeta primary signaling domain can comprise an amino acid sequence having at least one, two or three modifications but not more than 20, 10 or 5 modifications of an amino acid sequence of SEQ ID NO: 21 or SEQ ID NO: 24, or a sequence with 95-99% identity to an amino acid sequence of SEQ ID NO: 21 or SEQ ID NO: 24. In some embodiments, the encoded primary signaling domain comprises a sequence of SEQ ID NO: 21 or SEQ ID NO: 24. In other embodiments, the nucleic acid sequence encoding the primary signaling domain comprises a sequence of SEQ ID NO: 22 or SEQ ID NO: 25, or a sequence with 95-99% identity thereof.

### Costimulatory Signaling Domains

[0599] In some embodiments, the encoded intracellular signaling domain comprises a costimulatory signaling domain. For example, the intracellular signaling domain can comprise a primary signaling domain and a costimulatory signaling domain. In some embodiments, the encoded costimulatory signaling domain comprises a functional signaling domain of a protein chosen from one or more of CD27, CD28, 4-1BB (CD137), OX40, CD30, CD40, PD-1, ICOS, lymphocyte function-associated antigen-1 (LFA-1), CD2, CD7, LIGHT, NKG2C, B7-H3, a ligand that specifically binds with CD83, CDS, ICAM-1, GITR, BAFFR, HVEM (LIGHTR), SLAMF7, NKp80 (KLRF1), CD160, CD19, CD4, CD8alpha, CD8beta, IL2R beta, IL2R gamma, IL7R alpha, ITGA4, VLA1, CD49a, ITGA4, IA4, CD49D, ITGA6, VLA-6, CD49f, ITGAD, CD11d, ITGAE, CD103, ITGAL, CD11a, LFA-1, ITGAM, CD11b, ITGAX, CD11c, ITGB1, CD29, ITGB2, CD18, LFA-1, ITGB7, TNFR2, TRANCE/RANKL, DNAMI (CD226), SLAMF4 (CD244, 2B4), CD84, CD96 (Tactile), CEACAM1, CRTAM, Ly9 (CD229), CD160 (BY55), PSGL1, CD100 (SEMA4D), CD69, SLAMF6 (NTB-A, Ly108), SLAM (SLAMF1, CD150, IPO-3), BLAME (SLAMF8), SELPLG (CD162), LTBR, LAT, GADS, SLP-76, PAG/Cbp, NKp44, NKp30, NKp46, or NKG2D.

[0600] In certain embodiments, the encoded costimulatory signaling domain comprises an amino acid sequence having at least one, two or three modifications but not more than 20, 10 or 5 modifications of an amino acid sequence of SEQ ID NO: 16 or SEQ ID NO: 19, or a sequence with 95-99% identity to an amino acid sequence of SEQ ID NO: 16 or SEQ ID NO: 19. In one embodiment, the encoded costimulatory signaling domain comprises a sequence of SEQ ID NO: 16 or SEQ ID NO: 19. In other embodiments, the nucleic acid sequence encoding the costimulatory signaling domain comprises a sequence of SEQ ID NO: 17 or SEQ ID NO: 20, or a sequence with 95-99% identity thereof.

[0601] In other embodiments, the encoded intracellular domain comprises the sequence of SEQ ID NO: 16 or SEQ ID NO: 19, and the sequence of SEQ ID NO: 21 or SEQ ID NO: 24, wherein the sequences comprising the intracellular signaling domain are expressed in the same frame and as a single polypeptide chain.

[0602] In certain embodiments, the nucleic acid sequence encoding the intracellular signaling domain comprises a sequence of SEQ ID NO: 17 or SEQ ID NO: 20, or a sequence with 95-99% identity thereof, and a sequence of SEQ ID NO: 22 or SEQ ID NO: 25, or a sequence with 95-99% identity thereof.

[0603] In some embodiments, the nucleic acid molecule further encodes a leader sequence. In one embodiment, the leader sequence comprises the sequence of SEQ ID NO: 2.

[0604] In one aspect, the intracellular signaling domain is designed to comprise the signaling domain of CD3-zeta and the signaling domain of CD28. In one aspect, the intracellular signaling domain is designed to comprise the signaling domain of CD3-zeta and the signaling domain of 4-1BB. In one aspect, the signaling domain of 4-1BB is a signaling domain of SEQ ID NO: 16. In one aspect, the signaling domain of CD3-zeta is a signaling domain of SEQ ID NO: 21.

[0605] In one aspect, the intracellular signaling domain is designed to comprise the signaling domain of CD3-zeta and the signaling domain of CD27. In one aspect, the signaling domain of CD27 comprises an amino acid sequence of QRRKYRSNKGESPVEPAEPCRYSCPREEEGSTIPIQEDYRKPEPACSP (SEQ ID NO: 19). In one aspect, the signalling domain of CD27 is encoded by a nucleic acid sequence of

(SEQ ID NO: 20)
AGGAGTAAGAGGAGCAGGCTCCTGCACAGTGACTACATGAACATGACTCC
CCGCCGCCCCGGGCCCACCCGCAAGCATTACCAGCCCTATGCCCCACCAC
GCGACTTCGCAGCCTATCGCTCC.

### Vectors

[0606] In another aspect, the disclosure pertains to a vector comprising a nucleic acid sequence encoding a CAR described herein. In one embodiment, the vector is chosen from a DNA vector, an RNA vector, a plasmid, a lentivirus vector, adenoviral vector, or a retrovirus vector. In one embodiment, the vector is a lentivirus vector. These vectors or portions thereof may, among other things, be used to create template nucleic acids, as described herein for use with the CRISPR systems as described herein. Alternatively, the vectors may be used to deliver nucleic acid directly to the cell, e.g., the immune effector cell, e.g., the T cell, e.g., the allogeneic T cell, independent of the CRISPR system.

[0607] The present disclosure also provides vectors in which a DNA disclosed herein is inserted. Vectors derived from retroviruses such as the lentivirus are suitable tools to achieve long-term gene transfer since they allow long-term, stable integration of a transgene and its propagation in daughter cells. Lentiviral vectors have the added advantage over vectors derived from onco-retroviruses such as murine leukemia viruses in that they can transduce non-proliferating cells, such as hepatocytes. They also have the added advantage of low immunogenicity. A retroviral vector may also be, e.g., a gammaretroviral vector. A gammaretroviral vector may include, e.g., a promoter, a packaging signal (w), a primer binding site (PBS), one or more (e.g., two) long terminal repeats (LTR), and a transgene of interest, e.g., a gene encoding a CAR. A gammaretroviral vector may lack viral structural gens such as gag, pol, and env. Exemplary gammaretroviral vectors include Murine Leukemia Virus (MLV), Spleen-Focus Forming Virus (SFFV), and Myeloproliferative Sarcoma Virus (MPSV), and vectors derived therefrom. Other gammaretroviral vectors are described, e.g., in Tobias Maetzig et al., “Gammaretroviral Vectors: Biology, Technology and Application” Viruses. 2011 June; 3 (6): 677-713.

[0608] In another embodiment, the vector comprising the nucleic acid encoding the desired CAR of the disclosure is an adenoviral vector (A5/35). In another embodiment, the expression of nucleic acids encoding CARs can be accomplished using of transposons such as sleeping beauty, crisper, CAS9, and zinc finger nucleases. See below June et al. 2009Nature Reviews Immunology 9.10:704-716, is incorporated herein by reference.

[0609] The nucleic acid can be cloned into a number of types of vectors. For example, the nucleic acid can be cloned into a vector including, but not limited to a plasmid, a phagemid, a phage derivative, an animal virus, and a cosmid. Vectors of particular interest include expression vectors, replication vectors, probe generation vectors, and sequencing vectors.

[0610] Disclosed herein are methods for producing an in vitro transcribed RNA CAR. The present disclosure also includes a CAR encoding RNA construct that can be directly transfected into a cell. A method for generating mRNA for use in transfection can involve in vitro transcription (IVT) of a template with specially designed primers, followed by polyA addition, to produce a construct containing 3′ and 5′ untranslated sequence (“UTR”), a 5′ cap and/or Internal Ribosome Entry Site (IRES), the nucleic acid to be expressed, and a polyA tail, typically 50-2000 bases in length (SEQ ID NO: 10555). RNA so produced can efficiently transfect different kinds of cells. In one aspect, the template includes sequences for the CAR.

### Non-Viral Delivery Methods

[0611] In some aspects, non-viral methods can be used to deliver a nucleic acid encoding a CAR described herein into a cell or tissue or a subject.

[0612] In some embodiments, the non-viral method includes the use of a transposon (also called a transposable element). In some embodiments, a transposon is a piece of DNA that can insert itself at a location in a genome, for example, a piece of DNA that is capable of self-replicating and inserting its copy into a genome, or a piece of DNA that can be spliced out of a longer nucleic acid and inserted into another place in a genome. For example, a transposon comprises a DNA sequence made up of inverted repeats flanking genes for transposition.

[0613] In some embodiments, cells, e.g., T or NK cells, are generated that express a CAR described herein by using a combination of gene insertion using the SBTS and genetic editing using a nuclease (e.g., Zinc finger nucleases (ZFNs), Transcription Activator-Like Effector Nucleases (TALENs), the CRISPR/Cas system, or engineered meganuclease re-engineered homing endonucleases). In specific embodiments, the use of the gene editing system inserts the nucleic acid sequence encoding the CAR at a defined locus, e.g., within a TET2 intron, e.g., within a sequence listed in Table 3.

[0614] In some embodiments, modified cells as disclosed herein, e.g., T or NK cells, e.g., autologous or allogeneic T cells, e.g., described herein, (e.g., that express a CAR described herein) are generated by contacting the cells with (a) a composition comprising one or more gRNA molecules, e.g., as described herein, and one or more Cas molecules, e.g., a Cas9 molecule, e.g., as described herein, and (b) nucleic acid comprising sequence encoding a CAR, e.g., described herein (such as a template nucleic acid molecule as described herein). Without being bound by theory, said composition of (a), above, will induce a break at or near the genomic DNA targeted by the targeting domain of the gRNA molecule(s), and the nucleic acid of (b) will incorporate, e.g., partially or wholly, into the genome at or near said break, such that upon integration, the encoded CAR molecule is expressed. In some embodiments, the % incorporation of the nucleic acid sequence is at least about 5%, 10%, 15%, 20%, 25%, 30%, 35%, 40%, 45%, 50%, 55%, 60%, 65% or 70% at a time point after the cell is contacted, as measured by a suitable method, e.g., PCR, sequencing, single-cell genotyping, ddPCR genotyping, Southern blot, and/or cell surface staining. In some embodiments, a population of cells is provided, for example, after subsequent selection steps, wherein the nucleic acid sequence is incorporated in, e.g., at least about 10%, 15%, 20%, 25%, 30%, 35%, 40%, 45%, 50%, 55%, 60%, 65%, 70%, 75%, 80%, 85%, 90%, 95%, or 99% of the cells of the population.

[0615] In embodiments, expression of the CAR will be controlled by promoters or other regulatory elements endogenous to the genome (e.g., the promoter controlling expression from the gene in which the nucleic acid of (b) was inserted). In other embodiments, the nucleic acid of (b) further comprises a promoter and/or other regulatory elements, e.g., as described herein, e.g., an EF1-alpha promoter, operably linked to the sequence encoding the CAR, such that upon integration, expression of the CAR is controlled by that promoter and/or other regulatory elements. Additional features of the disclosure relating to use of CRISPR/Cas9 systems, e.g., as described herein, to direct incorporation of nucleic acid sequence encoding a CAR, e.g., as described herein, are described elsewhere in this application, e.g., in the section relating to gene insertion and homologous recombination. In embodiments, the composition of a) above is a composition comprising RNPs comprising the one or more gRNA molecules. In embodiments, RNPs comprising gRNAs targeting unique target sequences are introduced into the cell simultaneously, e.g., as a mixture of RNPs comprising the one or more gRNAs. In embodiments, RNPs comprising gRNAs targeting unique target sequences are introduced into the cell sequentially.

[0616] In some embodiments, the modified cells are generated by contacting a cell with (a) a composition comprising one or more gRNA molecules, e.g., as described herein, and one or more Cas molecules, e.g., a Cas9 molecule, e.g., as described herein, and (b) a nucleic acid that is capable of disrupting the expression of TET2. Without being bound by theory, said composition of (a), above, will induce a break at or near the genomic DNA targeted by the targeting domain of the gRNA molecule(s), and the nucleic acid of (b) will incorporate, e.g., partially or wholly, into the genome at or near said break, such that upon integration, the expression of at least one TET2 isoform is reduced.

[0617] In some embodiments, the modified cells are generated by contacting a cell with (a) a composition comprising one or more gRNA molecules, e.g., as described herein, and one or more Cas molecules, e.g., a Cas9 molecule, e.g., as described herein, and (b) a nucleic acid comprising a sequence encoding a CAR. Without being bound by theory, said composition of (a), above, will induce a break at or near the genomic DNA targeted by the targeting domain of the gRNA molecule(s), and nucleic acid comprising a sequence encoding a CAR of (b) will incorporate, e.g., partially or wholly, into the genome at or near said break, such that upon integration, the expression of at least one TET2 isoform is reduced.

[0618] In some embodiments, use of a non-viral method of delivery permits reprogramming of cells, e.g., T or NK cells, and direct infusion of the cells into a subject. Advantages of non-viral vectors include but are not limited to the ease and relatively low cost of producing sufficient amounts required to meet a patient population, stability during storage, and lack of immunogenicity.

### Inhibitory Domains

[0619] In an embodiment, the vector comprises a nucleic acid sequence that encodes a CAR, e.g., a CAR described herein, and a nucleic acid sequence that encodes an inhibitory molecule comprising: an inhKIR cytoplasmic domain; a transmembrane domain, e.g., a KIR transmembrane domain; and an inhibitor cytoplasmic domain, e.g., an ITIM domain, e.g., an inhKIR ITIM domain. In an embodiment the inhibitory molecule is a naturally occurring inhKIR, or a sequence sharing at least 50, 60, 70, 80, 85, 90, 95, or 99% homology with, or that differs by no more than 1, 2, 3, 4, 5, 6, 7, 8, 9, 10, 15, or 20 residues from, a naturally occurring inhKIR.

[0620] In an embodiment, the nucleic acid sequence that encodes an inhibitory molecule comprises: a SLAM family cytoplasmic domain; a transmembrane domain, e.g., a SLAM family transmembrane domain; and an inhibitor cytoplasmic domain, e.g., a SLAM family domain, e.g., an SLAM family ITIM domain. In an embodiment the inhibitory molecule is a naturally occurring SLAM family member, or a sequence sharing at least 50, 60, 70, 80, 85, 90, 95, or 99% homology with, or that differs by no more than 1, 2, 3, 4, 5, 6, 7, 8, 9, 10, 15, or 20 residues from, a naturally occurring SLAM family member.

[0621] In one embodiment, the vector is an in vitro transcribed vector, e.g., a vector that transcribes RNA of a nucleic acid molecule described herein. In one embodiment, the nucleic acid sequence in the vector further comprises a poly(A) tail, e.g., a poly A tail. In one embodiment, the nucleic acid sequence in the vector further comprises a 3′UTR, e.g., a 3′ UTR described herein, e.g., comprising at least one repeat of a 3′UTR derived from human beta-globulin. In one embodiment, the nucleic acid sequence in the vector further comprises promoter, e.g., a T2A promoter.

### Promoters

[0622] In one embodiment, the vector further comprises a promoter. In some embodiments, the promoter is chosen from an EF-1 promoter, a CMV IE gene promoter, an EF-la promoter, an ubiquitin C promoter, or a phosphoglycerate kinase (PGK) promoter. In one embodiment, the promoter is an EF-1 promoter. In one embodiment, the EF-1 promoter comprises a sequence of SEQ ID NO: 1.

### Host Cells for CAR Expression

[0623] As noted above, in some aspects the disclosure pertains to a cell, e.g., an immune effector cell, (e.g., a population of cells, e.g., a population of immune effector cells) comprising a nucleic acid molecule (e.g., a template nucleic acid molecule), a CAR polypeptide molecule, or a vector as described herein.

[0624] In certain aspects of the present disclosure, immune effector cells, e.g., T cells, can be obtained from a unit of blood collected from a subject using any number of techniques known to the skilled artisan, such as Ficoll™ separation. In one preferred aspect, cells from the circulating blood of an individual are obtained by apheresis. The apheresis product typically contains lymphocytes, including T cells, monocytes, granulocytes, B cells, other nucleated white blood cells, red blood cells, and platelets. In one aspect, the cells collected by apheresis may be washed to remove the plasma fraction and, optionally, to place the cells in an appropriate buffer or media for subsequent processing steps. In one embodiment, the cells are washed with phosphate buffered saline (PBS). In an alternative embodiment, the wash solution lacks calcium and may lack magnesium or may lack many if not all divalent cations.

[0625] Initial activation steps in the absence of calcium can lead to magnified activation. As those of ordinary skill in the art would readily appreciate a washing step may be accomplished by methods known to those in the art, such as by using a semi-automated “flow-through” centrifuge (for example, the Cobe 2991 cell processor, the Baxter CytoMate, or the Haemonetics Cell Saver 5) according to the manufacturer's instructions. After washing, the cells may be resuspended in a variety of biocompatible buffers, such as, for example, Ca-free, Mg-free PBS, PlasmaLyte A, or other saline solution with or without buffer. Alternatively, the undesirable components of the apheresis sample may be removed and the cells directly resuspended in culture media.

[0626] It is recognized that the methods of the application can utilize culture media conditions comprising 5% or less, for example 2%, human AB serum, and employ known culture media conditions and compositions, for example those described in Smith et al., “Ex vivo expansion of human T cells for adoptive immunotherapy using the novel Xeno-free CTS Immune Cell Serum Replacement” Clinical & Translational Immunology (2015) 4, e31; doi: 10.1038/cti.2014.31.

[0627] In one aspect, T cells are isolated from peripheral blood lymphocytes by lysing the red blood cells and depleting the monocytes, for example, by centrifugation through a PERCOLL™ gradient or by counterflow centrifugal elutriation.

[0628] The methods described herein can include, e.g., selection of a specific subpopulation of immune effector cells, e.g., T cells, that are a T regulatory cell-depleted population, CD25+ depleted cells, using, e.g., a negative selection technique, e.g., described herein. Preferably, the population of T regulatory depleted cells contains less than 30%, 25%, 20%, 15%, 10%, 5%, 4%, 3%, 2%, 1% of CD25+ cells.

[0629] In one embodiment, T regulatory cells, e.g., CD25+ T cells, are removed from the population using an anti-CD25 antibody, or fragment thereof, or a CD25-binding ligand, IL-2. In one embodiment, the anti-CD25 antibody, or fragment thereof, or CD25-binding ligand is conjugated to a substrate, e.g., a bead, or is otherwise coated on a substrate, e.g., a bead. In one embodiment, the anti-CD25 antibody, or fragment thereof, is conjugated to a substrate as described herein.

[0630] In one embodiment, the T regulatory cells, e.g., CD25+ T cells, are removed from the population using CD25 depletion reagent from Miltenyi™. In one embodiment, the ratio of cells to CD25 depletion reagent is 1e7 cells to 20 uL, or 1e7 cells to 15 uL, or 1e7 cells to 10 uL, or 1e7 cells to 5 uL, or 1e7 cells to 2.5 uL, or 1e7 cells to 1.25 uL. In one embodiment, e.g., for T regulatory cells, e.g., CD25+ depletion, greater than 500 million cells/ml is used. In a further aspect, a concentration of cells of 600, 700, 800, or 900 million cells/ml is used.

[0631] In one embodiment, the population of immune effector cells to be depleted includes about 6×10⁹ CD25+ T cells. In other aspects, the population of immune effector cells to be depleted include about 1×10⁹ to 1×10¹⁰ CD25+ T cell, and any integer value in between. In one embodiment, the resulting population T regulatory depleted cells has 2×10⁹ T regulatory cells, e.g., CD25+ cells, or less (e.g., 1×10⁹, 5×10⁸, 1×10⁸, 5×10⁷, 1×10⁷, or less CD25+ cells).

[0632] In one embodiment, the T regulatory cells, e.g., CD25+ cells, are removed from the population using the CliniMAC system with a depletion tubing set, such as, e.g., tubing 162-01. In one embodiment, the CliniMAC system is run on a depletion setting such as, e.g., DEPLETION2.1.

[0633] Without wishing to be bound by a particular theory, decreasing the level of negative regulators of immune cells (e.g., decreasing the number of unwanted immune cells, e.g., TREG cells), in a subject prior to apheresis or during manufacturing of a CAR-expressing cell product can reduce the risk of subject relapse. For example, methods of depleting TREG cells are known in the art. Methods of decreasing TREG cells include, but are not limited to, cyclophosphamide, anti-GITR antibody (an anti-GITR antibody described herein), CD25-depletion, and combinations thereof.

[0634] In some embodiments, the manufacturing methods comprise reducing the number of (e.g., depleting) TREG cells prior to manufacturing of the CAR-expressing cell. For example, manufacturing methods comprise contacting the sample, e.g., the apheresis sample, with an anti-GITR antibody and/or an anti-CD25 antibody (or fragment thereof, or a CD25-binding ligand), e.g., to deplete TREG cells prior to manufacturing of the CAR-expressing cell (e.g., T cell, NK cell) product.

[0635] In an embodiment, a subject is pre-treated with one or more therapies that reduce TREG cells prior to collecting cells for CAR-expressing cell product manufacturing, thereby reducing the risk of subject relapse to CAR-expressing cell treatment. In an embodiment, methods of decreasing TREG cells include, but are not limited to, administration to the subject of one or more of cyclophosphamide, anti-GITR antibody, CD25-depletion, or a combination thereof. Administration of one or more of cyclophosphamide, anti-GITR antibody, CD25-depletion, or a combination thereof, can occur before, during or after an infusion of the CAR-expressing cell product.

[0636] In an embodiment, a subject is pre-treated with cyclophosphamide to reduce TREG cells prior to collecting cells for CAR-expressing cell product manufacturing, thereby reducing the risk of subject relapse to CAR-expressing cell treatment. In an embodiment, a subject is pre-treated with an anti-GITR antibody prior to collection of cells for CAR-expressing cell product manufacturing, thereby reducing the risk of subject relapse to CAR-expressing cell treatment.

[0637] In one embodiment, the population of cells to be removed are neither the regulatory T cells or tumor cells, but cells that otherwise negatively affect the expansion and/or function of CART cells, e.g. cells expressing CD14, CD11b, CD33, CD15, or other markers expressed by potentially immune suppressive cells. In one embodiment, such cells are envisioned to be removed concurrently with regulatory T cells and/or tumor cells, or following said depletion, or in another order.

[0638] The methods described herein can include more than one selection step, e.g., more than one depletion step. Enrichment of a T cell population by negative selection can be accomplished, e.g., with a combination of antibodies directed to surface markers unique to the negatively selected cells. One method is cell sorting and/or selection via negative magnetic immunoadherence or flow cytometry that uses a cocktail of monoclonal antibodies directed to cell surface markers present on the cells negatively selected. For example, to enrich for CD4+ cells by negative selection, a monoclonal antibody cocktail can include antibodies to CD14, CD20, CD11b, CD16, HLA-DR, and CD8.

[0639] The methods described herein can further include removing cells from the population which express a tumor antigen, e.g., a tumor antigen that does not comprise CD25, e.g., CD19, CD30, CD38, CD123, CD20, CD14 or CD11b, to thereby provide a population of T regulatory depleted, e.g., CD25+ depleted, and tumor antigen depleted cells that are suitable for expression of a CAR, e.g., a CAR described herein. In one embodiment, tumor antigen expressing cells are removed simultaneously with the T regulatory, e.g., CD25+ cells. For example, an anti-CD25 antibody, or fragment thereof, and an anti-tumor antigen antibody, or fragment thereof, can be attached to the same substrate, e.g., bead, which can be used to remove the cells or an anti-CD25 antibody, or fragment thereof, or the anti-tumor antigen antibody, or fragment thereof, can be attached to separate beads, a mixture of which can be used to remove the cells. In other embodiments, the removal of T regulatory cells, e.g., CD25+ cells, and the removal of the tumor antigen expressing cells is sequential, and can occur, e.g., in either order.

[0640] Also provided are methods that include removing cells from the population which express a check point inhibitor, e.g., a check point inhibitor described herein, e.g., one or more of PD1+ cells, LAG3+ cells, and TIM3+ cells, to thereby provide a population of T regulatory depleted, e.g., CD25+ depleted cells, and check point inhibitor depleted cells, e.g., PD1+, LAG3+ and/or TIM3+ depleted cells. Exemplary check point inhibitors include B7-H1, B7-1, CD160, P1H, 2B4, PD1, TIM3, CEACAM (e.g., CEACAM-1, CEACAM-3 and/or CEACAM-5), LAG3, TIGIT, CTLA-4, BTLA and LAIR1. In one embodiment, check point inhibitor expressing cells are removed simultaneously with the T regulatory, e.g., CD25+ cells. For example, an anti-CD25 antibody, or fragment thereof, and an anti-check point inhibitor antibody, or fragment thereof, can be attached to the same bead which can be used to remove the cells, or an anti-CD25 antibody, or fragment thereof, and the anti-check point inhibitor antibody, or fragment there, can be attached to separate beads, a mixture of which can be used to remove the cells. In other embodiments, the removal of T regulatory cells, e.g., CD25+ cells, and the removal of the check point inhibitor expressing cells is sequential, and can occur, e.g., in either order.

[0641] Methods described herein can include a positive selection step. For example, T cells can be isolated by incubation with anti-CD3/anti-CD28 (e.g., 3×28)-conjugated beads, such as DYNABEADS® M-450 CD3/CD28 T, for a time period sufficient for positive selection of the desired T cells. In one embodiment, the time period is about 30 minutes. In a further embodiment, the time period ranges from 30 minutes to 36 hours or longer and all integer values there between. In a further embodiment, the time period is at least 1, 2, 3, 4, 5, or 6 hours. In yet another embodiment, the time period is 10 to 24 hours, e.g., 24 hours. Longer incubation times may be used to isolate T cells in any situation where there are few T cells as compared to other cell types, such in isolating tumor infiltrating lymphocytes (TIL) from tumor tissue or from immunocompromised individuals. Further, use of longer incubation times can increase the efficiency of capture of CD8+ T cells. Thus, by simply shortening or lengthening the time T cells are allowed to bind to the CD3/CD28 beads and/or by increasing or decreasing the ratio of beads to T cells (as described further herein), subpopulations of T cells can be preferentially selected for or against at culture initiation or at other time points during the process. Additionally, by increasing or decreasing the ratio of anti-CD3 and/or anti-CD28 antibodies on the beads or other surface, subpopulations of T cells can be preferentially selected for or against at culture initiation or at other desired time points.

[0642] In one embodiment, a T cell population can be selected that expresses one or more of IFN-γ, TNFα, IL-17A, IL-2, IL-3, IL-4, GM-CSF, IL-10, IL-13, granzyme B, and perforin, or other appropriate molecules, e.g., other cytokines. Methods for screening for cell expression can be determined, e.g., by the methods described in PCT Publication No.: WO 2013/126712.

[0643] For isolation of a desired population of cells by positive or negative selection, the concentration of cells and surface (e.g., particles such as beads) can be varied. In certain aspects, it may be desirable to significantly decrease the volume in which beads and cells are mixed together (e.g., increase the concentration of cells), to ensure maximum contact of cells and beads. For example, in one aspect, a concentration of 10 billion cells/ml, 9 billion/ml, 8 billion/ml, 7 billion/ml, 6 billion/ml, or 5 billion/ml is used. In one aspect, a concentration of 1 billion cells/ml is used. In yet one aspect, a concentration of cells from 75, 80, 85, 90, 95, or 100 million cells/ml is used. In further aspects, concentrations of 125 or 150 million cells/ml can be used.

[0644] Using high concentrations can result in increased cell yield, cell activation, and cell expansion. Further, use of high cell concentrations allows more efficient capture of cells that may weakly express target antigens of interest, such as CD28-negative T cells, or from samples where there are many tumor cells present (e.g., leukemic blood, tumor tissue, etc.). Such populations of cells may have therapeutic value and would be desirable to obtain. For example, using high concentration of cells allows more efficient selection of CD8+ T cells that normally have weaker CD28 expression.

[0645] In a related aspect, it may be desirable to use lower concentrations of cells. By significantly diluting the mixture of T cells and surface (e.g., particles such as beads), interactions between the particles and cells is minimized. This selects for cells that express high amounts of desired antigens to be bound to the particles. For example, CD4+ T cells express higher levels of CD28 and are more efficiently captured than CD8+ T cells in dilute concentrations. In one aspect, the concentration of cells used is 5×10⁶/ml. In other aspects, the concentration used can be from about 1×10⁵/ml to 1×10⁶/ml, and any integer value in between.

[0646] In other aspects, the cells may be incubated on a rotator for varying lengths of time at varying speeds at either 2-10° C. or at room temperature.

[0647] T cells for stimulation can also be frozen after a washing step. Wishing not to be bound by theory, the freeze and subsequent thaw step provides a more uniform product by removing granulocytes and to some extent monocytes in the cell population. After the washing step that removes plasma and platelets, the cells may be suspended in a freezing solution. While many freezing solutions and parameters are known in the art and will be useful in this context, one method involves using PBS containing 20% DMSO and 8% human serum albumin, or culture media containing 10% Dextran 40 and 5% Dextrose, 20% Human Serum Albumin and 7.5% DMSO, or 31.25% Plasmalyte-A, 31.25% Dextrose 5%, 0.45% NaCl, 10% Dextran 40 and 5% Dextrose, 20% Human Serum Albumin, and 7.5% DMSO or other suitable cell freezing media containing for example, Hespan and PlasmaLyte A, the cells then are frozen to −80° C. at a rate of 1° per minute and stored in the vapor phase of a liquid nitrogen storage tank. Other methods of controlled freezing may be used as well as uncontrolled freezing immediately at −20° C. or in liquid nitrogen.

[0648] In certain aspects, cryopreserved cells are thawed and washed as described herein and allowed to rest for one hour at room temperature prior to activation using the methods of the present disclosure.

[0649] Also contemplated in the context of the disclosure is the collection of blood samples or apheresis product from a subject at a time period prior to when the expanded cells as described herein might be needed. As such, the source of the cells to be expanded can be collected at any time point necessary, and desired cells, such as T cells, isolated and frozen for later use in immune effector cell therapy for any number of diseases or conditions that would benefit from immune effector cell therapy, such as those described herein. In one aspect a blood sample or an apheresis is taken from a generally healthy subject. In certain aspects, a blood sample or an apheresis is taken from a generally healthy subject who is at risk of developing a disease, but who has not yet developed a disease, and the cells of interest are isolated and frozen for later use. In certain aspects, the T cells may be expanded, frozen, and used at a later time. In certain aspects, samples are collected from a patient shortly after diagnosis of a particular disease as described herein but prior to any treatments. In a further aspect, the cells are isolated from a blood sample or an apheresis from a subject prior to any number of relevant treatment modalities, including but not limited to treatment with agents such as natalizumab, efalizumab, antiviral agents, chemotherapy, radiation, immunosuppressive agents, such as cyclosporin, azathioprine, methotrexate, mycophenolate, and FK506, antibodies, or other immunoablative agents such as CAMPATH, anti-CD3 antibodies, cytoxan, fludarabine, cyclosporin, FK506, rapamycin, mycophenolic acid, steroids, FR901228, and irradiation.

[0650] In a further aspect of the present disclosure, T cells are obtained from a patient directly following treatment that leaves the subject with functional T cells. In this regard, it has been observed that following certain cancer treatments, in particular treatments with drugs that damage the immune system, shortly after treatment during the period when patients would normally be recovering from the treatment, the quality of T cells obtained may be optimal or improved for their ability to expand ex vivo. Likewise, following ex vivo manipulation using the methods described herein, these cells may be in a preferred state for enhanced engraftment and in vivo expansion. Thus, it is contemplated within the context of the present disclosure to collect blood cells, including T cells, dendritic cells, or other cells of the hematopoietic lineage, during this recovery phase. Further, in certain aspects, mobilization (for example, mobilization with GM-CSF) and conditioning regimens can be used to create a condition in a subject wherein repopulation, recirculation, regeneration, and/or expansion of particular cell types is favored, especially during a defined window of time following therapy. Illustrative cell types include T cells, B cells, dendritic cells, and other cells of the immune system.

[0651] In one embodiment, the immune effector cells expressing a CAR molecule, e.g., a CAR molecule described herein, are obtained from a subject that has received a low, immune enhancing dose of an mTOR inhibitor. In an embodiment, the population of immune effector cells, e.g., T cells, to be engineered to express a CAR, are harvested after a sufficient time, or after sufficient dosing of the low, immune enhancing, dose of an mTOR inhibitor, such that the level of PD1 negative immune effector cells, e.g., T cells, or the ratio of PD1 negative immune effector cells, e.g., T cells/PD1 positive immune effector cells, e.g., T cells, in the subject or harvested from the subject has been, at least transiently, increased.

[0652] In other embodiments, population of immune effector cells, e.g., T cells, which have, or will be engineered to express a CAR, can be treated ex vivo by contact with an amount of an mTOR inhibitor that increases the number of PD1 negative immune effector cells, e.g., T cells or increases the ratio of PD1 negative immune effector cells, e.g., T cells/PD1 positive immune effector cells, e.g., T cells.

[0653] In one embodiment, a T cell population is diaglycerol kinase (DGK)-deficient. DGK-deficient cells include cells that do not express DGK RNA or protein, or have reduced or inhibited DGK activity. DGK-deficient cells can be generated by genetic approaches, e.g., administering RNA-interfering agents, e.g., siRNA, shRNA, miRNA, to reduce or prevent DGK expression. Alternatively, DGK-deficient cells can be generated by treatment with DGK inhibitors described herein.

[0654] In one embodiment, a T cell population is Ikaros-deficient. Ikaros-deficient cells include cells that do not express Ikaros RNA or protein, or have reduced or inhibited Ikaros activity, Ikaros-deficient cells can be generated by genetic approaches, e.g., administering RNA-interfering agents, e.g., siRNA, shRNA, miRNA, to reduce or prevent Ikaros expression. Alternatively, Ikaros-deficient cells can be generated by treatment with Ikaros inhibitors, e.g., lenalidomide.

[0655] In embodiments, a T cell population is DGK-deficient and Ikaros-deficient, e.g., does not express DGK and Ikaros, or has reduced or inhibited DGK and Ikaros activity. Such DGK and Ikaros-deficient cells can be generated by any of the methods described herein.

[0656] In an embodiment, the NK cells are obtained from the subject. In another embodiment, the NK cells are an NK cell line, e.g., NK-92 cell line (Conkwest).

[0657] In some aspects, the cells of the disclosure (e.g., the immune effector cells of the disclosure, e.g., the CAR-expressing cells of the disclosure) are induced pluripotent stem cells (“iPSCs”) or embryonic stem cells (ESCs), or are T cells generated from (e.g., differentiated from) said iPSC and/or ESC. iPSCs can be generated, for example, by methods known in the art, from peripheral blood T lymphocytes, e.g., peripheral blood T lymphocytes isolated from a healthy volunteer. As well, such cells may be differentiated into T cells by methods known in the art. See e.g., Themeli M. et al., Nat. Biotechnol., 31, pp. 928-933 (2013); doi: 10.1038/nbt.2678; WO2014/165707, the contents of each of which are incorporated herein by reference in their entirety.

### Additional Expressed Agents

[0658] In embodiments, the CAR-expressing immune effector cell described herein can express a CAR comprising a conditional expression domain, for example, as described in WO2017/181119, or a CAR comprising a degradation domain as described in WO2017/024318. In some embodiments, a conditional expression domain may be used with a single CAR (e.g., a single CAR comprising one antigen binding domain, or a single CAR comprising two or more antigen binding domains) or with multiple CARs.

[0659] In another embodiment, a CAR-expressing immune effector cell described herein can further express another agent, e.g., an agent which enhances the activity of a CAR-expressing cell. Such additional expressed agents can be introduced together with the CAR, e.g., in the same vector or template nucleic acid, or in a separate vector.

[0660] For example, in one embodiment, the agent can be an agent which inhibits an inhibitory molecule. Examples of inhibitory molecules include PD-1, PD-L1, CTLA-4, TIM-3, CEACAM (e.g., CEACAM-1, CEACAM-3 and/or CEACAM-5), LAG-3, VISTA, BTLA, TIGIT, LAIR1, CD160, 2B4 and TGF beta, e.g., as described herein. In one embodiment, the agent that inhibits an inhibitory molecule comprises a first polypeptide, e.g., an inhibitory molecule, associated with a second polypeptide that provides a positive signal to the cell, e.g., an intracellular signaling domain described herein. In one embodiment, the agent comprises a first polypeptide, e.g., of an inhibitory molecule such as PD-1, PD-L1, CTLA-4, TIM-3, CEACAM (e.g., CEACAM-1, CEACAM-3 and/or CEACAM-5), LAG-3, VISTA, BTLA, TIGIT, LAIR1, CD160, 2B4 or TGF beta, or a fragment of any of these, and a second polypeptide which is an intracellular signaling domain described herein (e.g., comprising a costimulatory domain (e.g., 41BB, CD27 or CD28, e.g., as described herein) and/or a primary signaling domain (e.g., a CD3 zeta signaling domain described herein). In one embodiment, the agent comprises a first polypeptide of PD-1 or a fragment thereof, and a second polypeptide of an intracellular signaling domain described herein (e.g., a CD28, CD27, OX40 or 4-IBB signaling domain described herein and/or a CD3 zeta signaling domain described herein). In embodiments, the agent comprises a first polypeptide of an extracellular domain of an inhibitory molecule and a second polypeptide of an intracellular signaling domain of a costimulatory molecule described herein or primary signaling molecule described herein. Such molecules in which an inhibitory molecule (e.g., a domain of an inhibitory molecule) is associated with a molecule that provides a positive signal (e.g., a domain of a costimulatory molecule or primary signaling molecule) are further described in, for example, WO2013/019615.

[0661] In one embodiment, the CAR-expressing immune effector cell described herein can further comprise a second CAR, e.g., a second CAR that includes a different antigen binding domain, e.g., toa different epitope on the same target (e.g., a target described above) or a different target. In one embodiment, the second CAR includes an antigen binding domain to a target expressed on the same cancer cell type as the target of the first CAR. In one embodiment, the CAR-expressing immune effector cell comprises a first CAR that targets a first antigen and includes an intracellular signaling domain having a costimulatory signaling domain but not a primary signaling domain, and a second CAR that targets a second, different, antigen and includes an intracellular signaling domain having a primary signaling domain but not a costimulatory signaling domain.

[0662] While not wishing to be bound by theory, placement of a costimulatory signaling domain, e.g., 4-1BB, CD28, CD27 or OX-40, onto the first CAR, and the primary signaling domain, e.g., CD3 zeta, on the second CAR can limit the CAR activity to cells where both targets are expressed. In one embodiment, the CAR expressing immune effector cell comprises a first CAR that includes an antigen binding domain that targets, e.g., a target described above, a transmembrane domain and a costimulatory domain and a second CAR that targets an antigen other than antigen targeted by the first CAR (e.g., an antigen expressed on the same cancer cell type as the first target) and includes an antigen binding domain, a transmembrane domain and a primary signaling domain. In another embodiment, the CAR expressing immune effector cell comprises a first CAR that includes an antigen binding domain that targets, e.g., a target described above, a transmembrane domain and a primary signaling domain and a second CAR that targets an antigen other than antigen targeted by the first CAR (e.g., an antigen expressed on the same cancer cell type as the first target) and includes an antigen binding domain to the antigen, a transmembrane domain and a costimulatory signaling domain.

[0663] In one embodiment, the CAR-expressing immune effector cell comprises a CAR described herein, e.g., a CAR to a target described above, and an inhibitory CAR. In one embodiment, the inhibitory CAR comprises an antigen binding domain that binds an antigen found on normal cells but not cancer cells, e.g., normal cells that also express the target. In one embodiment, the inhibitory CAR comprises the antigen binding domain, a transmembrane domain and an intracellular domain of an inhibitory molecule. For example, the intracellular domain of the inhibitory CAR can be an intracellular domain of PD1, PD-L1, CTLA-4, TIM-3, CEACAM (e.g., CEACAM-1, CEACAM-3 and/or CEACAM-5), LAG-3, VISTA, BTLA, TIGIT, LAIR1, CD160, 2B4 or TGF beta.

[0664] In one embodiment, an immune effector cell (e.g., T cell, NK cell) comprises a first CAR comprising an antigen binding domain that binds to a tumor antigen as described herein, and a second CAR comprising a PD1 extracellular domain or a fragment thereof.

[0665] In one embodiment, the cell further comprises an inhibitory molecule as described above. Non-limiting examples of inhibitory molecules include PD-1, PD-L1, PD-L2, CTLA4, TIM3, LAG3, CEACAM (e.g., CEACAM-1, CEACAM-3 and/or CEACAM-5), VISTA, BTLA, TIGIT, LAIR1, CD160, 2B4, CD80, CD86, B7-H3 (CD276), B7-H4 (VTCN1), HVEM (TNFRSF14 or CD107), KIR, A2aR, MHC class I, MHC class II, GAL9, adenosine, and TGF beta.

[0666] In one embodiment, the second CAR in the cell is an inhibitory CAR, wherein the inhibitory CAR comprises an antigen binding domain, a transmembrane domain, and an intracellular domain of an inhibitory molecule. The inhibitory molecule can be chosen from one or more of: PD1, PD-L1, CTLA-4, TIM-3, LAG-3, VISTA, BTLA, TIGIT, LAIR1, CD160, 2B4, TGF beta, CEACAM-1, CEACAM-3, and CEACAM-5. In one embodiment, the second CAR molecule comprises the extracellular domain of PD1 or a fragment thereof.

[0667] In embodiments, the second CAR molecule in the cell further comprises an intracellular signaling domain comprising a primary signaling domain and/or an intracellular signaling domain.

[0668] In other embodiments, the intracellular signaling domain in the cell comprises a primary signaling domain comprising the functional domain of CD3 zeta and a costimulatory signaling domain comprising the functional domain of 4-1BB.

[0669] In one embodiment, the second CAR molecule in the cell comprises the amino acid sequence of SEQ ID NO: 30.

[0670] In certain embodiments, the antigen binding domain of the first CAR molecule comprises a scFv and the antigen binding domain of the second CAR molecule does not comprise a scFv. For example, the antigen binding domain of the first CAR molecule comprises a scFv and the antigen binding domain of the second CAR molecule comprises a camelid VHH domain.

[0671] In other aspects and embodiments, a cell of the disclosure, e.g., a cell engineered to express a CAR, is also engineered to express a safety molecule, such as a molecule (or set of molecules) which mediates the depleting of the cells, e.g., CAR T cells, when appropriate (e.g., after the T cells have accomplished the anti-tumor function, or if the T cells are causing life-threatening side effects). In one exemplary aspect, the safety molecule a molecule that does not affect the function of the cell, but which can be targeted by another agent, e.g., an antibody or ADC molecule targeting said molecule. One exemplary embodiment of such a molecule is a truncated receptor, e.g., a receptor comprising the extracellular domain and transmembrane domain of a receptor, but lacking all or a substantial portion of the intracellular domain of the receptor. An example is a truncated EGFR receptor, e.g., as described in WO2011/056894. Without being bound by theory, targeting said truncated EGFR receptor with an anti-EGFR antibody, e.g., cetuximab, will deplete cells expressing the truncated EGFR receptor. A second example is a iCasp9 switch polypeptide, e.g., a polypeptide having a dimerization domain, an optional linker, and a caspase domain oriented such that, when expressed in the presence of a dimerization compound in a mammalian host cell, the iCasp9 switch polypeptide homo-dimerizes, resulting in apoptosis of the host cell. In embodiments, the dimerization domain is a FKBP-based dimerization domain, e.g., the sequence harbors a mutation (F37V) which provides a complementary fitting cavity for AP1903 and AP1903-structurally related ligands (such as AP20187), which molecules may act as a dimerization compound. Such iCasp9 switch polypeptides (and associated dimerization compounds) are described in, for example, WO1997/031899, US2011/286980, WO2014/164348, WO2013/040371, US2013/071414, WO2014/255360, and N Engl J Med. 2011 Nov. 3; 365 (18): 1673-83. A third example of such a molecule is a molecule targeted by an anti-CD20 antibody, wherein, for example, administering an anti-CD20 antibody (e.g., rituximab) allows said cells to be depleted. Examples of molecules targeted by an anti-CD20 antibody include CD20, and truncated versions thereof (e.g., molecules comprising an extracellular domain recognizable by an anti-CD20 antibody, a transmembrane domain, and lacking at least a portion of an intracellular domain).

### Split CAR

[0672] In some embodiments, the CAR-expressing cell uses a split CAR. The split CAR approach is described in more detail in publications WO2014/055442 and WO2014/055657. Briefly, a split CAR system comprises a cell expressing a first CAR having a first antigen binding domain and a costimulatory domain (e.g., 41BB), and the cell also expresses a second CAR having a second antigen binding domain and an intracellular signaling domain (e.g., CD3 zeta). When the cell encounters the first antigen, the costimulatory domain is activated, and the cell proliferates. When the cell encounters the second antigen, the intracellular signaling domain is activated and cell-killing activity begins. Thus, the CAR-expressing cell is only fully activated in the presence of both antigens.

### Multiple CAR Expression

[0673] In one aspect, the CAR-expressing cell described herein can further comprise a second CAR (see, e.g., Additional Expressed Agents above), e.g., a second CAR that includes a different antigen binding domain, e.g., to the same target or a different target (e.g., a target other than a cancer associated antigen described herein or a different cancer associated antigen described herein). In one embodiment, the second CAR includes an antigen binding domain to a target expressed by the same cancer cell type as the cancer associated antigen targeted by the first CAR. In one embodiment, the CAR-expressing cell comprises a first CAR that targets a first antigen and includes an intracellular signaling domain having a costimulatory signaling domain but not a primary signaling domain, and a second CAR that targets a second, different, antigen and includes an intracellular signaling domain having a primary signaling domain but not a costimulatory signaling domain. While not wishing to be bound by theory, placement of a costimulatory signaling domain, e.g., 4-1BB, CD28, CD27 or OX-40, onto the first CAR, and the primary signaling domain, e.g. CD3 zeta, on the second CAR can limit the CAR activity to cells where both targets are expressed. In one embodiment, the CAR expressing cell comprises a first cancer associated antigen CAR that includes an antigen binding domain that binds a target antigen described herein, a transmembrane domain and a costimulatory domain and a second CAR that targets a different target antigen (e.g., an antigen expressed on that same cancer cell type as the first target antigen) and includes an antigen binding domain, a transmembrane domain and a primary signaling domain. In another embodiment, the CAR expressing cell comprises a first CAR that includes an antigen binding domain that binds a target antigen described herein, a transmembrane domain and a primary signaling domain and a second CAR that targets an antigen other than the first target antigen (e.g., an antigen expressed on the same cancer cell type as the first target antigen) and includes an antigen binding domain to the antigen, a transmembrane domain and a costimulatory signaling domain.

[0674] In some embodiments, the CAR-expressing cell comprises a first and second CAR, wherein the antigen binding domain of one of said first CAR said second CAR does not comprise a variable light domain and a variable heavy domain. In some embodiments, the antigen binding domain of one of said first CAR said second CAR is an scFv, and the other is not an scFv. In some embodiments, the antigen binding domain of one of said first CAR said second CAR comprises a single VH domain, e.g., a camelid, shark, or lamprey single VH domain, or a single VH domain derived from a human or mouse sequence. In some embodiments, the antigen binding domain of one of said first CAR said second CAR comprises a nanobody. In some embodiments, the antigen binding domain of one of said first CAR said second CAR comprises a camelid VHH domain.

### Telomerase Expression

[0675] While not wishing to be bound by any particular theory, in some embodiments, a therapeutic T cell has short term persistence in a patient, due to shortened telomeres in the T cell; accordingly, transfection with a telomerase gene can lengthen the telomeres of the T cell and improve persistence of the T cell in the patient. See Carl June, “Adoptive T cell therapy for cancer in the clinic”, Journal of Clinical Investigation, 117:1466-1476 (2007). Thus, in an embodiment, an immune effector cell, e.g., a T cell, as disclosed herein can further comprise an ectopically expressed telomerase subunit, e.g., the catalytic subunit of telomerase, e.g., TERT, e.g., hTERT. In some aspects, this disclosure provides a method of producing a CAR-expressing cell with longer persistence in a patient, comprising contacting a cell with a nucleic acid encoding a telomerase subunit, e.g., the catalytic subunit of telomerase, e.g., TERT, e.g., hTERT. The cell may be contacted with the nucleic acid before, simultaneous with, or after being contacted with a construct encoding a CAR.

[0676] In embodiments in which a cell is engineered to express more than one molecule, the sequence encoding each of said molecules (e.g., sequence encoding a CAR and sequence encoding an NK inhibitory molecule) can be disposed on the same nucleic acid molecule (e.g., same template nucleic acid), e.g., the same plasmid or vector, e.g., viral vector, e.g., lentiviral vector. In an embodiment, (i) sequence encoding a CAR, as described herein, and (ii) sequence encoding an NK inhibitory molecule, as described herein, can be present on the same nucleic acid, e.g., vector. Production of the corresponding proteins can be achieved, e.g., by the use of separate promoters, or by the use of a bicistronic transcription product (which can result in the production of two proteins by cleavage of a single translation product or by the translation of two separate protein products). In an embodiment, a sequence encoding a cleavable peptide, e.g., a P2A, T2A or F2A sequence, is disposed between (i) and (ii). In an embodiment, a sequence encoding an IRES, e.g., an EMCV or EV71 IRES, is disposed between (i) and (ii). In these embodiments, (i) and (ii) are transcribed as a single RNA. In other aspects, each molecule may be expressed from a different promoter. In an embodiment, a first promoter is operably linked to (i) and a second promoter is operably linked to (ii), such that (i) and (ii) are transcribed as separate mRNAs.

[0677] Alternatively, the sequence encoding the more than one molecules can be disposed on the different nucleic acid molecules (e.g., different template nucleic acid molecules), e.g., different plasmids or vectors, e.g., viral vector, e.g., lentiviral vector. E.g., the (i) sequence encoding a CAR as described herein can be present on a first nucleic acid, e.g., a first vector, and the (ii) sequence encoding a NK inhibitory molecule can be present on the second nucleic acid, e.g., the second vector. In various embodiments, the sequences below may be used.

TABLE 24
Exemplary sequences of various components of CAR (aa - amino acids, na -
nucleic acids that encodes the corresponding protein)

| SEQ | | |
|---|---|---|
| ID | | |
| NO | description | Sequence |
| 1 | EF-1 | CGTGAGGCTCCGGTGCCCGTCAGTGGGCAGAGCGCACATCGCCCACA |
| | promoter | GTCCCCGAGAAGTTGGGGGGAGGGGTCGGCAATTGAACCGGTGCCTA |
| | | GAGAAGGTGGCGCGGGGTAAACTGGGAAAGTGATGTCGTGTACTGG |
| | | CTCCGCCTTTTTCCCGAGGGTGGGGGAGAACCGTATATAAGTGCAGT |
| | | AGTCGCCGTGAACGTTCTTTTTCGCAACGGGTTTGCCGCCAGAACACA |
| | | GGTAAGTGCCGTGTGTGGTTCCCGCGGGCCTGGCCTCTTTACGGGTTA |
| | | TGGCCCTTGCGTGCCTTGAATTACTTCCACCTGGCTGCAGTACGTGAT |
| | | TCTTGATCCCGAGCTTCGGGTTGGAAGTGGGTGGGAGAGTTCGAGGC |
| | | CTTGCGCTTAAGGAGCCCCTTCGCCTCGTGCTTGAGTTGAGGCCTGGC |
| | | CTGGGCGCTGGGGCCGCCGCGTGCGAATCTGGTGGCACCTTCGCGCC |
| | | TGTCTCGCTGCTTTCGATAAGTCTCTAGCCATTTAAAATTTTTGATGA |
| | | CCTGCTGCGACGCTTTTTTTCTGGCAAGATAGTCTTGTAAATGCGGGC |
| | | CAAGATCTGCACACTGGTATTTCGGTTTTTGGGGCCGCGGGCGGCGA |
| | | CGGGGCCCGTGCGTCCCAGCGCACATGTTCGGCGAGGCGGGGCCTGC |
| | | GAGCGCGGCCACCGAGAATCGGACGGGGGTAGTCTCAAGCTGGCCG |
| | | GCCTGCTCTGGTGCCTGGCCTCGCGCCGCCGTGTATCGCCCCGCCCTG |
| | | GGCGGCAAGGCTGGCCCGGTCGGCACCAGTTGCGTGAGCGGAAAGA |
| | | TGGCCGCTTCCCGGCCCTGCTGCAGGGAGCTCAAAATGGAGGACGCG |
| | | GCGCTCGGGAGAGCGGGCGGGTGAGTCACCCACACAAAGGAAAAGG |
| | | GCCTTTCCGTCCTCAGCCGTCGCTTCATGTGACTCCACGGAGTACCGG |
| | | GCGCCGTCCAGGCACCTCGATTAGTTCTCGAGCTTTTGGAGTACGTCG |
| | | TCTTTAGGTTGGGGGGAGGGGTTTTATGCGATGGAGTTTCCCCACACT |
| | | GAGTGGGTGGAGACTGAAGTTAGGCCAGCTTGGCACTTGATGTAATT |
| | | CTCCTTGGAATTTGCCCTTTTTGAGTTTGGATCTTGGTTCATTCTCAAG |
| | | CCTCAGACAGTGGTTCAAAGTTTTTTTCTTCCATTTCAGGTGTCGTGA |
| 2 | Leader (aa) | MALPVTALLLPLALLLHAARP |
| 3 | Leader (na) | ATGGCCCTGCCTGTGACAGCCCTGCTGCTGCCTCTGGCTCTGCTGCTG |
| | | CATGCCGCTAGACCC |
| 4 | Leader (na) | ATGGCCCTCCCTGTCACCGCCCTGCTGCTTCCGCTGGCTCTTCTGCTCC |
| | | ACGCCGCTCGGCCC |
| 5 | CD 8 hinge | TTTPAPRPPTPAPTIASQPLSLRPEACRPAAGGAVHTRGLDFACD |
| | (aa) | |
| 6 | CD8 hinge | ACCACGACGCCAGCGCCGCGACCACCAACACCGGCGCCCACCATCGC |
| | (na) | GTCGCAGCCCCTGTCCCTGCGCCCAGAGGCGTGCCGGCCAGCGGCGG |
| | | GGGGCGCAGTGCACACGAGGGGGCTGGACTTCGCCTGTGAT |
| 7 | Ig4 hinge | ESKYGPPCPPCPAPEFLGGPSVFLFPPKPKDTLMISRTPEVTCVVVDVSQE |
| | (aa) | DPEVQFNWYVDGVEVHNAKTKPREEQFNSTYRVVSVLTVLHQDWLNG |
| | | KEYKCKVSNKGLPSSIEKTISKAKGQPREPQVYTLPPSQEEMTKNQVSLT |
| | | CLVKGFYPSDIAVEWESNGQPENNYKTTPPVLDSDGSFFLYSRLTVDKSR |
| | | WQEGNVFSCSVMHEALHNHYTQKSLSLSLGKM |
| 8 | Ig4 hinge | GAGAGCAAGTACGGCCCTCCCTGCCCCCCTTGCCCTGCCCCCGAGTTC |
| | (na) | CTGGGCGGACCCAGCGTGTTCCTGTTCCCCCCCAAGCCCAAGGACAC |
| | | CCTGATGATCAGCCGGACCCCCGAGGTGACCTGTGTGGTGGTGGACG |
| | | TGTCCCAGGAGGACCCCGAGGTCCAGTTCAACTGGTACGTGGACGGC |
| | | GTGGAGGTGCACAACGCCAAGACCAAGCCCCGGGAGGAGCAGTTCA |
| | | ATAGCACCTACCGGGTGGTGTCCGTGCTGACCGTGCTGCACCAGGAC |
| | | TGGCTGAACGGCAAGGAATACAAGTGTAAGGTGTCCAACAAGGGCCT |
| | | GCCCAGCAGCATCGAGAAAACCATCAGCAAGGCCAAGGGCCAGCCT |
| | | CGGGAGCCCCAGGTGTACACCCTGCCCCCTAGCCAAGAGGAGATGAC |
| | | CAAGAACCAGGTGTCCCTGACCTGCCTGGTGAAGGGCTTCTACCCCA |
| | | GCGACATCGCCGTGGAGTGGGAGAGCAACGGCCAGCCCGAGAACAA |
| | | CTACAAGACCACCCCCCCTGTGCTGGACAGCGACGGCAGCTTCTTCCT |
| | | GTACAGCCGGCTGACCGTGGACAAGAGCCGGTGGCAGGAGGGCAAC |
| | | GTCTTTAGCTGCTCCGTGATGCACGAGGCCCTGCACAACCACTACACC |
| | | CAGAAGAGCCTGAGCCTGTCCCTGGGCAAGATG |
| 9 | IgD hinge | RWPESPKAQASSVPTAQPQAEGSLAKATTAPATTRNTGRGGEEKKKEKE |
| | (aa) | KEEQEERETKTPECPSHTQPLGVYLLTPAVQDLWLRDKATFTCFVVGSD |
| | | LKDAHLTWEVAGKVPTGGVEEGLLERHSNGSQSQHSRLTLPRSLWNAG |
| | | TSVTCTLNHPSLPPQRLMALREPAAQAPVKLSLNLLASSDPPEAASWLLC |
| | | EVSGFSPPNILLMWLEDQREVNTSGFAPARPPPQPGSTTFWAWSVLRVP |
| | | APPSPQPATYTCVVSHEDSRTLLNASRSLEVSYVTDH |
| 10 | IgD hinge | AGGTGGCCCGAAAGTCCCAAGGCCCAGGCATCTAGTGTTCCTACTGC |
| | (na) | ACAGCCCCAGGCAGAAGGCAGCCTAGCCAAAGCTACTACTGCACCTG |
| | | CCACTACGCGCAATACTGGCCGTGGCGGGGAGGAGAAGAAAAAGGA |
| | | GAAAGAGAAAGAAGAACAGGAAGAGAGGGAGACCAAGACCCCTGA |
| | | ATGTCCATCCCATACCCAGCCGCTGGGCGTCTATCTCTTGACTCCCGC |
| | | AGTACAGGACTTGTGGCTTAGAGATAAGGCCACCTTTACATGTTTCGT |
| | | CGTGGGCTCTGACCTGAAGGATGCCCATTTGACTTGGGAGGTTGCCG |
| | | GAAAGGTACCCACAGGGGGGGTTGAGGAAGGGTTGCTGGAGCGCCA |
| | | TTCCAATGGCTCTCAGAGCCAGCACTCAAGACTCACCCTTCCGAGATC |
| | | CCTGTGGAACGCCGGGACCTCTGTCACATGTACTCTAAATCATCCTAG |
| | | CCTGCCCCCACAGCGTCTGATGGCCCTTAGAGAGCCAGCCGCCCAGG |
| | | CACCAGTTAAGCTTAGCCTGAATCTGCTCGCCAGTAGTGATCCCCCAG |
| | | AGGCCGCCAGCTGGCTCTTATGCGAAGTGTCCGGCTTTAGCCCGCCC |
| | | AACATCTTGCTCATGTGGCTGGAGGACCAGCGAGAAGTGAACACCAG |
| | | CGGCTTCGCTCCAGCCCGGCCCCCACCCCAGCCGGGTTCTACCACATT |
| | | CTGGGCCTGGAGTGTCTTAAGGGTCCCAGCACCACCTAGCCCCCAGC |
| | | CAGCCACATACACCTGTGTTGTGTCCCATGAAGATAGCAGGACCCTG |
| | | CTAAATGCTTCTAGGAGTCTGGAGGTTTCCTACGTGACTGACCATT |
| 11 | GS | GGGGSGGGGS |
| | hinge/linker | |
| | (aa) | |
| 12 | GS | GGTGGCGGAGGTTCTGGAGGTGGAGGTTCC |
| | hinge/linker | |
| | (na) | |
| 13 | CD8TM (aa) | IYIWAPLAGTCGVLLLSLVITLYC |
| 14 | CD8 TM | ATCTACATCTGGGCGCCCTTGGCCGGGACTTGTGGGGTCCTTCTCCTG |
| | (na) | TCACTGGTTATCACCCTTTACTGC |
| 15 | CD8 TM | ATCTACATTTGGGCCCCTCTGGCTGGTACTTGCGGGGTCCTGCTGCTT |
| | (na) | TCACTCGTGATCACTCTTTACTGT |
| 16 | 4-1BB | KRGRKKLLYIFKQPFMRPVQTTQEEDGCSCRFPEEEEGGCEL |
| | intracellular | |
| | domain (aa) | |
| 17 | 4-1BB | AAACGGGGCAGAAAGAAACTCCTGTATATATTCAAACAACCATTTAT |
| | intracellular | GAGACCAGTACAAACTACTCAAGAGGAAGATGGCTGTAGCTGCCGAT |
| | domain (na) | TTCCAGAAGAAGAAGAAGGAGGATGTGAACTG |
| 18 | 4-1BB | AAGCGCGGTCGGAAGAAGCTGCTGTACATCTTTAAGCAACCCTTCAT |
| | intracellular | GAGGCCTGTGCAGACTACTCAAGAGGAGGACGGCTGTTCATGCCGGT |
| | domain (na) | TCCCAGAGGAGGAGGAAGGCGGCTGCGAACTG |
| 19 | CD27 (aa) | QRRKYRSNKGESPVEPAEPCRYSCPREEEGSTIPIQEDYRKPEPACSP |
| 20 | CD27 (na) | AGGAGTAAGAGGAGCAGGCTCCTGCACAGTGACTACATGAACATGA |
| | | CTCCCCGCCGCCCCGGGCCCACCCGCAAGCATTACCAGCCCTATGCC |
| | | CCACCACGCGACTTCGCAGCCTATCGCTCC |
| 21 | CD3-zeta | RVKFSRSADAPAYKQGQNQLYNELNLGRREEYDVLDKRRGRDPEMGG |
| | (aa) | KPRRKNPQEGLYNELQKDKMAEAYSEIGMKGERRRGKGHDGLYQGLST |
| | | ATKDTYDALHMQALPPR |
| 22 | CD3-zeta | AGAGTGAAGTTCAGCAGGAGCGCAGACGCCCCCGCGTACAAGCAGG |
| | (na) | GCCAGAACCAGCTCTATAACGAGCTCAATCTAGGACGAAGAGAGGA |
| | | GTACGATGTTTTGGACAAGAGACGTGGCCGGGACCCTGAGATGGGGG |
| | | GAAAGCCGAGAAGGAAGAACCCTCAGGAAGGCCTGTACAATGAACT |
| | | GCAGAAAGATAAGATGGCGGAGGCCTACAGTGAGATTGGGATGAAA |
| | | GGCGAGCGCCGGAGGGGCAAGGGGCACGATGGCCTTTACCAGGGTC |
| | | TCAGTACAGCCACCAAGGACACCTACGACGCCCTTCACATGCAGGCC |
| | | CTGCCCCCTCGC |
| 23 | CD3-zeta | CGCGTGAAATTCAGCCGCAGCGCAGATGCTCCAGCCTACAAGCAGGG |
| | (na) | GCAGAACCAGCTCTACAACGAACTCAATCTTGGTCGGAGAGAGGAGT |
| | | ACGACGTGCTGGACAAGCGGAGAGGACGGGACCCAGAAATGGGCGG |
| | | GAAGCCGCGCAGAAAGAATCCCCAAGAGGGCCTGTACAACGAGCTC |
| | | CAAAAGGATAAGATGGCAGAAGCCTATAGCGAGATTGGTATGAAAG |
| | | GGGAACGCAGAAGAGGCAAAGGCCACGACGGACTGTACCAGGGACT |
| | | CAGCACCGCCACCAAGGACACCTATGACGCTCTTCACATGCAGGCCC |
| | | TGCCGCCTCGG |
| 24 | CD3-zeta | RVKFSRSADAPAYQQGQNQLYNELNLGRREEYDVLDKRRGRDPEMGG |
| | (aa) | KPRRKNPQEGLYNELQKDKMAEAYSEIGMKGERRRGKGHDGLYQGLST |
| | | ATKDTYDALHMQALPPR |
| 25 | CD3-zeta | AGAGTGAAGTTCAGCAGGAGCGCAGACGCCCCCGCGTACCAGCAGG |
| | (na) | GCCAG |
| | | AACCAGCTCTATAACGAGCTCAATCTAGGACGAAGAGAGGAGTACG |
| | | ATGTTT |
| | | TGGACAAGAGACGTGGCCGGGACCCTGAGATGGGGGGAAAGCCGAG |
| | | AAGGA |
| | | AGAACCCTCAGGAAGGCCTGTACAATGAACTGCAGAAAGATAAGAT |
| | | GGCGG |
| | | AGGCCTACAGTGAGATTGGGATGAAAGGCGAGCGCCGGAGGGGCAA |
| | | GGGGC |
| | | ACGATGGCCTTTACCAGGGTCTCAGTACAGCCACCAAGGACACCTAC |
| | | GACGC |
| | | CCTTCACATGCAGGCCCTGCCCCCTCGC |
| 26 | linker | GGGGS |
| 28 | PD-1 | Pgwfldspdrpwnpptfspallvvtegdnatftcsfsntsesfvlnwyrmspsnqtdklaafpedrsqpgqdcr |
| | extracellular | frvtqlpngrdfhmsvvrarrndsgtylcgaislapkaqikeslraelrvterraevptahpspsprpagqfqtlv |
| | domain (aa) | |
| 29 | PD-1 | Cccggatggtttctggactctccggatcgcccgtggaatcccccaaccttctcaccggcactcttggttgtgactga |
| | extracellular | gggcgataatgcgaccttcacgtgctcgttctccaacacctccgaatcattcgtgctgaactggtaccgcatgagcc |
| | domain (na) | cgtcaaaccagaccgacaagctcgccgcgtttccggaagatcggtcgcaaccgggacaggattgtcggttccgc |
| | | gtgactcaactgccgaatggcagagacttccacatgagcgtggtccgcgctaggcgaaacgactccgggacctac |
| | | ctgtgcggagccatctcgctggcgcctaaggcccaaatcaaagagagcttgagggccgaactgagagtgaccga |
| | | gcgcagagctgaggtgccaactgcacatccatccccatcgcctcggcctgcggggcagtttcagaccctggtc |
| 30 | PD-1 CAR | Malpvtalllplalllhaarppgwfldspdrpwnpptfspallvvtegdnatftcsfsntsesfvlnwyrmspsnq |
| | (aa) with | tdklaafpedrsqpgqdcrfrvtqlpngrdfhmsvvrarrndsgtylcgaislapkaqikeslraelrvterraevp |
| | signal | tahpspsprpagqfqtlvtttpaprpptpaptiasqplslrpeacrpaaggavhtrgldfacdiyiwaplagtcgvll |
| | | lslvitlyckrgrkkllyifkqpfmrpvqttqeedgccrfpeeeeggcelrvkfsrsadapaykqgqnqlyneln |
| | | lgrreeydvldkrrgrdpemggkprrknpqeglynelqkdkmaeayseigmkgerrrgkghdglyqglstat |
| | | kdtydalhmqalppr |
| 31 | PD-1 CAR | Atggccctccctgtcactgccctgcttctccccctcgcactcctgctccacgccgctagaccacccggatggtttct |
| | (na) | ggactctccggatcgcccgtggaatcccccaaccttctcaccggcactcttggttgtgactgagggcgataatgcga |
| | | ccttcacgtgctcgttctccaacacctccgaatcattcgtgctgaactggtaccgcatgagcccgtcaaaccagacc |
| | | gacaagctcgccgcgtttccggaagatcggtcgcaaccgggacaggattgtcggttccgcgtgactcaactgccg |
| | | aatggcagagacttccacatgagcgtggtccgcgctaggcgaaacgactccgggacctacctgtgcggagccat |
| | | ctcgctggcgcctaaggcccaaatcaaagagagcttgagggccgaactgagagtgaccgagcgcagagctgag |
| | | gtgccaactgcacatccatccccatcgcctcggcctgcggggcagtttcagaccctggtcacgaccactccggcg |
| | | ccgcgcccaccgactccggccccaactatcgcgagccagcccctgtcgctgaggccggaagcatgccgccctg |
| | | ccgccggaggtgctgtgcatacccggggattggacttcgcatgcgacatctacatttgggctcctctcgccggaact |
| | | tgtggcgtgctccttctgtccctggtcatcaccctgtactgcaagcggggtcggaaaaagcttctgtacattttcaagc |
| | | agcccttcatgaggcccgtgcaaaccacccaggaggaggacggttgctcctgccggttccccgaagaggaagaa |
| | | ggaggttgcgagctgcgcgtgaagttctcccggagcgccgacgcccccgcctataagcagggccagaaccagc |
| | | tgtacaacgaactgaacctgggacggcgggaagagtacgatgtgctggacaagcggcgcggccgggaccccg |
| | | aaatgggcgggaagcctagaagaaagaaccctcaggaaggcctgtataacgagctgcagaaggacaagatggc |
| | | cgaggcctactccgaaattgggatgaagggagagcggcggaggggaaaggggcacgacggcctgtaccaagg |
| | | actgtccaccgccaccaaggacacatacgatgccctgcacatgcaggcccttccccctcgc |
| 32 | linker | (Gly-Gly-Gly-Ser)n, where n = 1-10 |
| 33 | linker | (Gly-Gly-Gly-Gly-Ser)n, where n = 1-10 |
| 34 | linker | (Gly4 Ser)4 |
| 35 | linker | (Gly4 Ser)3 |
| 36 | linker | (Gly3 Ser) |
| 37 | PD1 CAR | Pgwfldspdrpwnpptfspallvvtegdnatftcsfsntsesfvlnwyrmspsnqtdklaafpedrsqpgqdcr |
| | (aa) | frvtqlpngrdfhmsvvrarrndsgtylcgaislapkaqikeslraelrvterraevptahpspsprpagqfqtlvtt |
| | | tpaprpptpaptiasqplslrpeacrpaaggavhtrgldfacdiyiwaplagtcgvlllslvitlyckrgrkkllyifk |
| | | qpfmrpvqttqeedgescrfpeeeeggcelrvkfsrsadapaykqgqnqlynelnlgrreeydvldkrrgrdpe |
| | | mggkprrknpqeglynelqkdkmaeayseigmkgerrrgkghdglyqglstatkdtydalhmqalppr |
| 38 | linker | GSTSGSGKPGSGEGSTKG |

### VI. Cells

[0678] In various embodiments, provided herein are cells, e.g., T or NK cells, e.g., autologous or allogeneic T cells. In some embodiments, the cell expresses at least one CAR as described herein. In some embodiments, the at least one CAR is BCMA. In some embodiments, the at least one CAR is CD19. In some embodiments, the CAR is encoded and expressed from a genomic insertion at or near the TET2 gene in the cell, e.g., at or near an intron or intron-exon junction, e.g., the intron between exons 9 and 10 of TET2. In some embodiments, the cell expresses at least one CAR and has reduced, disrupted, or eliminated expression of at least one gene that regulates MHC I expression, e.g., MHC I HLA-A, HLA-B, HLA-C, B2M, NLRC5, and/or MHC II expression, e.g., MHC II HLA-DM, HLA-DO, HLA-DR, HLA-DQ, HLA-DP, CIITA, RFXANK, RFXAP, RFX1, RFX5, NF-YA, NF—YB, NF—YC, X2BP, OCAB. In some embodiments, the cell is generated using a CRISPR system as described herein. Other methods for generating said cells may also be used.

[0679] In an aspect, the disclosure provides for cells comprising a gene editing system, e.g., a CRISPR system, described herein. In an aspect, the disclosure provides for cells modified by a gene editing system, e.g., a CRISPR system, described herein.

[0680] In another aspect, the disclosure provides cells which comprise, or which at any time comprised, a gRNA molecule, e.g., one or more gRNA molecules, as described herein, or a CRISPR system as described herein. In an embodiment, the cell has been altered, e.g., the target sequence targeted by the gRNA molecule has been altered, e.g., to create an indel, by introduction of a gRNA molecule as described herein (or nucleic acid encoding said gRNA molecule), or a CRISPR system (or nucleic acid encoding one or more components of said CRISPR system) as described herein, e.g., altered by a method described herein. In an embodiment, the alteration results in a change in transcription or translation of the functional (e.g., wild type) gene product of the gene comprising the target site. In an embodiment, the alteration results in reduced or no expression of the functional (e.g., wild type) gene product of the gene comprising the target site. In embodiments, the alteration is insertion of heterologous nucleic acid sequence, e.g., from a template nucleic acid (e.g., as described herein), e.g., sequence encoding a CAR (e.g., as described herein). In embodiments, the alteration results in reduced or no expression of the functional (e.g., wild type) gene product of the gene comprising the target site and insertion of heterologous nucleic acid sequence, e.g., from a template nucleic acid at the same target site. In embodiments, the alteration results in reduced or no expression of the functional (e.g., wild type) gene product of the gene comprising the target site and insertion of heterologous nucleic acid sequence, e.g., from a template nucleic acid at a different target site.

[0681] In one aspect, the cell is an animal cell. In embodiments, the cell is a mammalian, primate, or human cell. In embodiments, the cell is a human cell. In embodiments, the cell is an immune effector cell (e.g., a population of immune effector cells), for example a T cell or NK cell. In embodiments, the T cell (e.g., population of T cells) is or comprises a CD4+ T cell, a CD8+ T cell, or a combination thereof. In embodiments, the cell is autologous. In embodiments, the cell is allogeneic.

[0682] In a preferred embodiment the cell (or the population of cells) has been, or will be, engineered to express a chimeric antigen receptor (CAR), e.g., a CAR as described in Section V. In embodiments, the cell is engineered to express a BCMA CAR, e.g., as described herein. In embodiments, the CAR-engineered cell is allogeneic. In embodiments, the CAR-engineered cell is autologous. In embodiments, the sequence encoding the CAR is stably integrated into the genome of the cell within a TET2 intron, e.g., at or near a target sequence of a gRNA molecule described herein. In embodiments, the nucleic acid sequence integrated into said site does not comprise sequence of a lentivirus vector (e.g., does not comprise a cPPT or CPT element).

[0683] In another aspect, the disclosure provides cells, such as those described above, which include, has at any time included, or will include a second gRNA molecule as described herein, e.g., a second gRNA molecule with a targeting domain different from that of the first gRNA molecule. In embodiments, the two gRNA molecules are complementary to target sites within the same TET2 intron. In other embodiments, the two or more gRNA molecules are complementary to target sequences in different genes. In embodiments, at least one of said gRNA molecules comprises a targeting domain complementary to a TET2 intron sequence, e.g., as described herein. In embodiments, the one or more other gRNA molecules target sequences within an inhibitory molecule gene (e.g., PDCD1), an allogeneic T cell target (e.g., B2M, CIITA, RFXANK, RFXAP, RFX1, RFX5, or a component of the T cell receptor, e.g., TRAC, TRBC, CD3E, CD3D, or CD3G, or combinations thereof).

[0684] It will be understood that in any of the disclosed aspects and embodiments in which two or more target sites of different genes (or different molecular complexes, e.g., when targeting a TET2 intron, a component of the T cell receptor, and B2M) are targeted, that for any or all of the different gene (or molecular complex) targets, two or more gRNAs may be employed with respect to one or more of said different genes or different molecular complexes.

[0685] Additionally or alternatively, when gRNA molecules targeting more than one gene are employed, they may be employed for different means. For example, one may utilize a gRNA molecule to a TET2 intron in conjunction with a template nucleic acid to insert heterologous nucleic acid sequence at or near the target sequence within the TET2 intron. At the same time, one may further utilize one or more additional gRNA molecules to one or more additional targets, e.g., to a component of the T cell receptor (e.g., TRAC), B2M and/or CIITA, to reduce or eliminate expression and/or function of said one or more genes. These additional gRNA molecules may be utilized at the same time, subsequently, or prior to the first gRNA molecule.

[0686] In some embodiments, the two or more, e.g. two, gRNA molecules are complementary to target sites within different genes. Such cells may comprise alterations, e.g., indels, at or near each target site such that expression of the functional gene product of more than one gene is reduced or eliminated. As discussed above, in such embodiments, more than one gRNA molecule targeted to each of the different genes may be employed.

[0687] In embodiments, the cell comprises, has comprised or will comprise a first gRNA molecule comprising a targeting domain complementary with a target sequence of a TET2 intron or intron-exon junction (e.g., a targeting domain described in Tables 1, or 2). The cell may also comprise, or at any time has comprised or will comprise, a second gRNA molecule comprising a targeting domain complementary with a target sequence of an inhibitory molecule and/or a third gRNA molecule comprising a targeting domain complementary to a target sequence of TRAC, TRBC1, TRBC2, CD247, CD3D, CD3E, or CD3G, and/or a fourth gRNA molecule comprising a targeting domain complementary with a target sequence of B2M, NLRC5, HLA-A, HLA-B or HLA-C, and/or a 5^{th} gRNA molecule comprising a targeting domain complementary with a target sequence of CIITA. In embodiments the cell comprises heterologous nucleic acid sequence, e.g., sequence encoding a CAR, e.g., as described herein, integrated at or near a site targeted by the gRNA molecule to TET2, and optionally, has reduced or eliminated expression of one or more genes, e.g., one or more genes targeted by the second, third, fourth and/or fifth gRNA molecules.

[0688] In embodiments, a cell, e.g., a CAR-expressing cell as described herein, may comprises one or more modifications (e.g., heterologous nucleic acid sequence insertion, or nucleotide insertions or deletions) to an intron of TET2; one or more modifications (e.g., nucleotide insertions or deletions) to an endogenous gene encoding a component of the T cell receptor (e.g., TRAC or TRBC); one or more modifications (e.g., nucleotide insertions or deletions) to an endogenous B2M gene; and/or one or more modifications (e.g., nucleotide insertions or deletions) to an endogenous CIITA gene. In embodiments, one or more of said modifications reduce or eliminate expression of said gene. In embodiments, the disclosure provides a cell, e.g., a CAR-expressing cell, e.g., as described herein, with a modification to a TET2 intron that is further TCR- (e.g., has a level of expression of TCR greater than 50%, 60%, 70%, 80%, 90%, 95%, 96%, 97%, 98%, or 99% lower than that of an unmodified cell of the same type, as detected by FACS, e.g., FACS using an anti-CD3 antibody), B2M- (e.g., has a level of expression of B2M and/or one or more MHC class I proteins greater than 50%, 60%, 70%, 80%, 90%, 95%, 96%, 97%, 98%, or 99% lower than that of an unmodified cell of the same type, as detected by FACS, e.g., FACS using an anti-B2M antibody) and/or CIITA- (e.g., has a level of expression of CIITA and/or a MHC class II protein greater than 50%, 60%, 70%, 80%, 90%, 95%, 96%, 97%, 98%, or 99% lower than that of an unmodified cell of the same type, as detected by FACS, e.g., FACS using an anti-CIITA antibody). In an embodiment, the cell is engineered to express a CAR molecule, e.g., as described herein. In embodiments, the CAR is a CD19 CAR, e.g., as described herein. In other embodiments, the CAR is a BCMA CAR, e.g., as described herein. In other embodiments, the CAR is a CD123 CAR, e.g., as described herein.

[0689] In an aspect, a cell of the disclosure comprises (or a population of cells comprises one or more cells which comprise):
[0690] (a) Nucleic acid sequence encoding a CAR, e.g., a template nucleic acid comprising sequence encoding a CAR, e.g., as described herein, e.g., wherein said nucleic acid sequence encoding the CAR is (or becomes) integrated into the genome at a site at or near the target sequence of a TET2 intron gRNA molecule described herein (e.g., a gRNA molecule comprising a targeting domain of Table 1 or Table 2);

[0691] Wherein the cell (or population of cells comprises one or more cells which) expresses the CAR. In embodiments, the nucleic acid sequence encoding the CAR is integrated in only one allele of the target sequence. In embodiments, one or more functions of TET2 is reduced or eliminated in said cell. In embodiments, one or more functions of TET2 is reduced, e.g., reduced by 10%, 20%, 30%, 40%, 50%, 60% or more, but not eliminated.

[0692] In an aspect, a cell of the disclosure comprises (e.g., a population of cells of the disclosure comprises one or more cells which comprise):
[0693] (b) Nucleic acid sequence encoding a CAR, e.g., a template nucleic acid comprising sequence encoding a CAR, e.g., as described herein, e.g., wherein said nucleic acid sequence encoding the CAR is (or becomes) integrated into the genome at a site at or near the target sequence of a TET2 intron gRNA molecule described herein (e.g., a gRNA molecule comprising a targeting domain of Table 1 or Table 2);
[0694] (c) An indel at or near a sequence of a gene encoding a component of a TCR (e.g., TRAC, TRBC1 or TRBC2, e.g. TRAC) or its regulatory elements, e.g., an indel at or near a target sequence of a gRNA comprising a targeting domain to a component of a TCR (e.g., TRAC, TRBC1 or TRBC2, e.g. TRAC);
[0695] (d) An indel at or near a sequence of the gene encoding B2M or its regulatory elements, e.g., an indel at or near a target sequence of a gRNA comprising a targeting domain to B2M; and

[0696] Optionally, an indel at or near a sequence of the gene encoding CIITA or its regulatory elements, e.g., an indel at or near a target sequence of a gRNA comprising a targeting domain to CIITA; wherein the cell (or population of cells comprises one or more cells which) expresses the CAR, and exhibits reduced or eliminated expression and/or function of one or more of: i) a component of a TCR (e.g., TRAC, TRBC1 or TRBC2, e.g. TRAC), ii) B2M, and/or iii) CIITA

[0697] In any of the aforementioned embodiments and aspects the cell comprises one or more CRISPR systems, e.g., as described herein, comprising the gRNA molecule(s) indicated. In embodiments, the cell comprises one or more ribonuclear protein (RNP) complexes each comprising a Cas9 molecule, e.g., as described herein, and a gRNA molecule comprising the indicated targeting domain, e.g., as described herein. In embodiments, including in any of the methods described herein, where gRNAs to more than one target sequence are employed, the gRNAs (and CRISPR systems comprising said gRNAs) may be introduced into the cell simultaneously. In other embodiments, including in any of the methods described herein, where gRNAs to more than one target sequence are employed, the gRNAs (and CRISPR systems comprising said gRNAs) may be introduced into the cell sequentially.

[0698] In an aspect involving any of the aforementioned embodiments or aspects, the population of cells comprises at least 20%, e.g., at least 30%, at least 40%, at least 50%, at least 60%, at least 70%, at least 80%, at least 90%, at least 95%, or at least 99%, of cells which include an insertion of nucleic acid sequence encoding the CAR at or near the target sequence of a gRNA targeting a TET2 intron or intron-exon junction (as described herein), e.g., include an insertion of nucleic acid sequence encoding the CAR at or near the target sequence of a gRNA targeting a TET2 intron or intron-exon junction (as described herein) at only one allele. In an aspect involving any of the aforementioned embodiments or aspects, the population of cells comprises at least 20%, e.g., at least 30%, at least 40%, at least 50%, at least 60%, at least 70%, at least 80%, at least 90%, at least 95%, or at least 99%, of cells which include an indel at or near each of the target sequences targeted by each of the gRNA molecules. Said population may be obtained, for example, by utilizing high efficiency gRNA molecules (e.g., gRNA molecules which cause an indel in >85% of said cells which are exposed to said gRNA molecule), or by enriching the population for the desired cell, e.g., by selecting for the desired cell population, e.g., by affinity chromatography or cell sorting.

### VII. Template Nucleic Acids (For Modification of Nucleic Acid Sequence)

[0699] In an aspect, the disclosure provides for insertion of nucleic acid sequence, e.g., nucleic acid sequence from a template nucleic acid, at or near a target sequence recognized by a CRISPR system, e.g., a CRISPR system comprising a gRNA molecule to a tet2 intron, e.g., to the intron between exon 9 and exon 10 of the tet2 gene, e.g., described herein. In an embodiment, nucleic acid sequence at or near the target sequence is modified to have some or all of the sequence of the template nucleic acid, typically at or near cleavage site(s). In an embodiment, the template nucleic acid is single stranded. In an alternate embodiment, the template nucleic acid is double stranded. In an embodiment, the template nucleic acid is DNA, e.g., double stranded DNA. In an alternate embodiment, the template nucleic acid is single stranded DNA.

[0700] In embodiments, the template nucleic acid comprises sequence encoding a first heterologous protein, for example, a chimeric antigen receptor (CAR), e.g., a CAR as described above in section V. In some embodiments, the template nucleic acid further comprises another nucleic acid sequence encoding a second heterologous protein. In some embodiments, the sequence encoding the first heterologous protein and the sequence encoding the second heterologous protein are transcribed as a single transcript. In embodiments, two (or more) proteins of interest may be separated from each other by inclusion of an intervening cleavage site, such as a 2A cleavage site. In other embodiments, the template nucleic acid includes an internal ribosomal entry site (IRES), such that the two (or more) proteins are produced as separate proteins from the same mRNA. Examples of 2A cleavage sites that can be used as described herein are shown below:

### 2A Peptide: Amino Acid Sequence*

T2A:
(SEQ ID NO: 130)
(GSG)EGRGSLLTCGDVEENPGP
P2A:
(SEQ ID NO: 131)
(GSG)ATNFSLLKQAGDVEENPGP
E2A:
(SEQ ID NO: 132)
(GSG)QCTNYALLKLAGDVESNPGP
F2A:
(SEQ ID NO: 133)
(GSG)VKQTLNFDLLKLAGDVESNPGP

[0701] (GSG) sequence is optional, and can be added to the 5′ end of the 2A sequence to improve cleavage in some contexts.

[0702] In an embodiment, the template nucleic acid alters the structure of the target position by participating in an insertion event, e.g., a homology directed repair event. In an embodiment, the template nucleic acid alters the sequence of the target position, for example by insertion of part or all of the template nucleic acid sequence at or near the target sequence. In an embodiment, the template nucleic acid results in the incorporation of a modified or non-naturally occurring base at or near the target sequence.

[0703] Mutations in a gene or pathway described herein may be corrected using one of the approaches discussed herein. In an embodiment, a mutation in a gene or pathway described herein is corrected by homology directed repair (HDR) using a template nucleic acid. In an embodiment, a mutation in a gene or pathway described herein is corrected by homologous recombination (HR) using a template nucleic acid. In an embodiment, a mutation in a gene or pathway described herein is corrected by Non-Homologous End Joining (NHEJ) repair using a template nucleic acid. In other embodiments, nucleic acid encoding molecules of interest may be inserted at or near a site modified by a CRISPR system of the present disclosure. In an embodiment, the nucleic acid inserted encodes a chimeric antigen receptor as described herein. In embodiments, the template nucleic acid comprises regulatory elements, e.g., one or more promotors and/or enhancers, operably linked to the nucleic acid sequence encoding a molecule of interest, e.g., a chimeric antigen receptor, e.g., as described herein.

HDR Repair and/or Insertion, and Template Nucleic Acids

[0704] As described herein, nuclease-induced homology directed repair (HDR) can be used to alter a target sequence (e.g., insert heterologous nucleic acid, e.g., insert nucleic acid encoding a heterologous protein) and/or correct (e.g., repair or edit) a mutation in the genome. While not wishing to be bound by theory, it is believed that alteration of the target sequence occurs by homology-directed repair (HDR) with a donor template or template nucleic acid. For example, the donor template or the template nucleic acid provides for alteration of the target sequence. It is contemplated that a plasmid donor can be used as a template for homologous recombination. It is contemplated that a vector can be used as a template nucleic acid, or can provide the template nucleic acid to a cell of interest. Exemplary vectors include lentiviral vectors, mRNA, adenoviral vectors, adenoassociated viral vectors (AAV), minicircles, and nanoplasmids. In an embodiment, the template nucleic acid is delivered by a recombinant AAV. In some embodiments, the AAV does not incorporate its genome into that of a host cell, e.g., a target cell, e.g., an immune effector cell, e.g., a T cell, e.g., as describe herein. In some embodiments, the AAV can incorporate its genome into that of the host cell. In some embodiments, the AAV is a self-complementary adenoassociated virus (scAAV), e.g., a scAAV that packages both strands which anneal together to form double stranded DNA. In an embodiment, an AAV capsid that can be used in the methods described herein is a capsid sequence from serotype AAV1, AAV2, AAV3, AAV4, AAV5, AAV6, AAV7, AAV8, AAV9, AAV.rh8, AAV.rh10, AAV rh32/33, AAV.rh43, AAV.rh64R1, or AAV7m8. In an embodiment, the template nucleic acid is delivered in a re-engineered AAV capsid, e.g., with 50% or greater, e.g., 60% or greater, 70% or greater, 80% or greater, 90% or greater, or 95% or greater, sequence homology with a capsid sequence from serotypes AAV1, AAV2, AAV3, AAV4, AAV5, AAV6, AAV7, AAV8, AAV9, AAV.rh8, AAV.rh10, AAV.rh32/33, AAV.rh43, or AAV. rh64R1. In an embodiment, the template nucleic acid is delivered by a chimeric AAV capsid. Exemplary chimeric AAV capsids include, but are not limited to, AAV911, AAV218, AAV-DJ, AAV2G9, AAV218G9, or AAV8G9. In a preferred embodiment, the vector is an AAV6 vector or reengineered AAV6 vector. It is further contemplated that a single stranded donor template can be used as a template for alteration of the target sequence by alternate methods of homology directed repair (e.g., single strand annealing) between the target sequence and the template nucleic acid. Template nucleic acid-effected alteration of a target sequence depends on cleavage by a Cas9 molecule. Cleavage by Cas9 can comprise a double strand break or two single strand breaks.

[0705] In an embodiment, a mutation can be corrected or nucleic acid sequence inserted by either a single double-strand break or two single strand breaks. In an embodiment, a mutation can be corrected or nucleic acid sequence inserted by (1) a single double-strand break, (2) two single strand breaks, (3) two double stranded breaks with a break occurring on each side of the target sequence, (4) one double stranded breaks and two single strand breaks with the double strand break and two single strand breaks occurring on each side of the target sequence or (5) four single stranded breaks with a pair of single stranded breaks occurring on each side of the target sequence.

### Double Strand Break Mediated Correction or Insertion

[0706] In an embodiment, double strand cleavage is effected by a Cas9 molecule having the ability to cleave both strands of DNA, for example, having cleavage activity associated with an HNH-like domain and cleavage activity associated with a RuvC-like domain, e.g., an N-terminal RuvC-like domain, e.g., a wild type Cas9. Such embodiments require only a single gRNA.

### Single Strand Break Mediated Correction or Insertion

[0707] In other embodiments, two single strand breaks, or nicks, are effected by a Cas9 molecule having nickase activity, e.g., cleavage activity associated with an HNH-like domain or cleavage activity associated with an N-terminal RuvC-like domain. Such embodiments require two gRNAs, one for placement of each single strand break. In an embodiment, the Cas9 molecule having nickase activity cleaves the strand to which the gRNA hybridizes, but not the strand that is complementary to the strand to which the gRNA hybridizes. In an embodiment, the Cas9 molecule having nickase activity does not cleave the strand to which the gRNA hybridizes, but rather cleaves the strand that is complementary to the strand to which the gRNA hybridizes.

[0708] In an embodiment, the nickase has HNH activity, e.g., a Cas9 molecule having the RuvC activity inactivated, e.g., a Cas9 molecule having a mutation at D10, e.g., the D10A mutation. D10A inactivates RuvC; therefore, the Cas9 nickase has (only) HNH activity and will cut on the strand to which the gRNA hybridizes (e.g., the complementary strand, which does not have the NGG PAM on it). In other embodiments, a Cas9 molecule having an H840, e.g., an H840A, mutation can be used as a nickase. H840A inactivates HNH; therefore, the Cas9 nickase has (only) RuvC activity and cuts on the non-complementary strand (e.g., the strand that has the NGG PAM and whose sequence is identical to the gRNA).

[0709] In an embodiment, in which a nickase and two gRNAs are used to position two single strand nicks, one nick is on the + strand and one nick is on the—strand of the target nucleic acid. The PAMs are outwardly facing. The gRNAs can be selected such that the gRNAs are separated by, from about 0-50, 0-100, or 0-200 nucleotides. In an embodiment, there is no overlap between the target sequence that is complementary to the targeting domains of the two gRNAs. In an embodiment, the gRNAs do not overlap and are separated by as much as 50, 100, or 200 nucleotides. In an embodiment, the use of two gRNAs can increase specificity, e.g., by decreasing off-target binding (Ran el al., CELL 2013).

[0710] In an embodiment, a single nick can be used to induce HDR. It is contemplated herein that a single nick can be used to increase the ratio of HDR, HR or NHEJ at a given cleavage site.

### Placement of the Double Strand Break or a Single Strand Break Relative to Target Position

[0711] The double strand break or single strand break in one of the strands should be sufficiently close to target position such that correction or insertion occurs at or near said target position. In an embodiment, the distance is not more than 50, 100, 200, 300, 350 or 400 nucleotides. While not wishing to be bound by theory, it is believed that the break should be sufficiently close to target position such that the break is within the region that is subject to exonuclease-mediated removal during end resection. If the distance between the target position and a break is too great, the mutation may not be included in the end resection and, therefore, may not be corrected, as donor sequence may only be used to correct sequence within the end resection region. For insertion, the distance between the target position (i.e., the position where the heterologous sequence is desired to be inserted) and the break should also be sufficiently close.

[0712] In an embodiment, in which a gRNA (e.g., sgRNA or dgRNA) and Cas9 nuclease induce a double strand break for the purpose of inducing HDR- or HR-mediated correction or insertion, the cleavage site is between 0-200 bp (e.g., 0 to 175, 0 to 150, 0 to 125, 0 to 100, 0 to 75, 0 to 50, 0 to 25, 25 to 200, 25 to 175, 25 to 150, 25 to 125, 25 to 100, 25 to 75, 25 to 50, 50 to 200, 50 to 175, 50 to 150, 50 to 125, 50 to 100, 50 to 75, 75 to 200, 75 to 175, 75 to 150, 75 to 1 25, 75 to 100 bp) away from the target position. In an embodiment, the cleavage site is between 0-100 bp (e.g., 0 to 75, 0 to 50, 0 to 25, 25 to 100, 25 to 75, 25 to 50, 50 to 100, 50 to 75 or 75 to 100 bp) away from the target position.

[0713] In an embodiment, in which two gRNAs (independently, unimolecular (or chimeric) or modular gRNA) complexing with Cas9 nickases induce two single strand breaks for the purpose of inducing HDR-mediated correction or insertion, the closer nick is between 0-200 bp (e.g., 0 to 175, 0 to 150, 0 to 125, 0 to 100, 0 to 75, 0 to 50, 0 to 25, 25 to 200, 25 to 175, 25 to 150, 25 to 125, 25 to 100, 25 to 75, 25 to 50, 50 to 200, 50 to 175, 50 to 150, 50 to 125, 50 to 100, 50 to 75, 75 to 200, 75 to 175, 75 to 150, 75 to 125, 75 to 100 bp) away from the target position and the two nicks will ideally be within 25-55 bp of each other (e.g., 25 to 50, 25 to 45, 25 to 40, 25 to 35, 25 to 30, 30 to 55, 30 to 50, 30 to 45, 30 to 40, 30 to 35, 35 to 55, 35 to 50, 35 to 45, 35 to 40, 40 to 55, 40 to 50, 40 to 45 bp) and no more than 100 bp away from each other (e.g., no more than 90, 80, 70, 60, 50, 40, 30, 20, 10 or 5 bp away from each other). In an embodiment, the cleavage site is between 0-100 bp (e.g., 0 to 75, 0 to 50, 0 to 25, 25 to 100, 25 to 75, 25 to 50, 50 to 100, 50 to 75 or 75 to 100 bp) away from the target position.

[0714] In one embodiment, two gRNAs, e.g., independently, unimolecular (or chimeric) or modular gRNA, are configured to position a double-strand break on both sides of a target position. In an alternate embodiment, three gRNAs, e.g., independently, unimolecular (or chimeric) or modular gRNA, are configured to position a double strand break (i.e., one gRNA complexes with a Cas9 nuclease) and two single strand breaks or paired single stranded breaks (i.e., two gRNAs complex with Cas9 nickases) on either side of the target position (e.g., the first gRNA is used to target upstream (i.e., 5′) of the target position and the second gRNA is used to target downstream (i.e., 3′) of the target position). In another embodiment, four gRNAs, e.g., independently, unimolecular (or chimeric) or modular gRNA, are configured to generate two pairs of single stranded breaks (i.e., two pairs of two gRNAs complex with Cas9 nickases) on either side of the target position (e.g., the first gRNA is used to target upstream (i.e., 5′) of the target position and the second gRNA is used to target downstream (i.e., 3′) of the target position). The double strand break(s) or the closer of the two single strand nicks in a pair will ideally be within 0-500 bp of the target position (e.g., no more than 450, 400, 350, 300, 250, 200, 150, 100, 50 or 25 bp from the target position). When nickases are used, the two nicks in a pair are within 25-55 bp of each other (e.g., between 25 to 50, 25 to 45, 25 to 40, 25 to 35, 25 to 30, 50 to 55, 45 to 55, 40 to 55, 35 to 55, 30 to 55, 30 to 50, 35. to 50, 40 to 50, 45 to 50, 35 to 45, or 40 to 45 bp) and no more than 100 bp away from each other (e.g., no more than 90, 80, 70, 60, 50, 40, 30, 20 or 10 bp).

[0715] In one embodiment, two gRNAs, e.g., independently, unimolecular (or chimeric) or modular gRNA, are configured to position a double-strand break on both sides of a target position. In an alternate embodiment, three gRNAs, e.g., independently, unimolecular (or chimeric) or modular gRNA, are configured to position a double strand break (i.e., one gRNA complexes with a Cas9 nuclease) and two single strand breaks or paired single stranded breaks (i.e., two gRNAs complex with Cas9 nickases) on two target sequences (e.g., the first gRNA is used to target an upstream (i.e., 5′) target sequence and the second gRNA is used to target a downstream (i.e., 3′) target sequence of an insertion site. In another embodiment, four gRNAs, e.g., independently, unimolecular (or chimeric) or modular gRNA, are configured to generate two pairs of single stranded breaks (i.e., two pairs of two gRNAs complex with Cas9 nickases) on either side of an insertion site (e.g., the first gRNA is used to target an upstream (i.e., 5′) target sequence described herein, and the second gRNA is used to target a downstream (i.e., 3′) target sequence described herein). The double strand break(s) or the closer of the two single strand nicks in a pair will ideally be within 0-500 bp of the target position (e.g., no more than 450, 400, 350, 300, 250, 200, 150, 100, 50 or 25 bp from the target position). When nickases are used, the two nicks in a pair are within 25-55 bp of each other (e.g., between 25 to 50, 25 to 45, 25 to 40, 25 to 35, 25 to 30, 50 to 55, 45 to 55, 40 to 55, 35 to 55, 30 to 55, 30 to 50, 35 to 50, 40 to 50, 45 to 50, 35 to 45, or 40 to 45 bp) and no more than 100 bp away from each other (e.g., no more than 90, 80, 70, 60, 50, 40, 30, 20 or 10 bp).

### Length of the Homology Arms

[0716] In embodiments, incorporation of the heterologous sequence may be facilitated by including in the template nucleic acid one or more, e.g., two (e.g., a 5′ and a 3′), homology arms having homology to sequence at or near, e.g., adjacent to, the target sequence or double strand break, e.g., homology arms having homology to sequence within a TET2 intron, or to sequence comprising sequence within a TET2 intron. The homology arm should extend at least as far as the region in which end resection may occur, e.g., in order to allow the resected single stranded overhang to find a complementary region within the donor template. The overall length could be limited by parameters such as plasmid size or viral packaging limits. In an embodiment, a homology arm does not extend into repeated elements, e.g., ALU repeats, LINE repeats. A template may have two homology arms of the same or different lengths.

[0717] In one embodiment, the homology arm comprises, e.g., consists of, the sequence below (SEQ ID NO: 124):

GAATTCCTGTTGCAAAGTGACCTGCTTTGGCATAACTAGCACTCTCATG
ATAGGTTGGCACATTAGTTTCCTGTCAATTGTGTTGACAAGCACATGAG
AATCATGGAAATCCTTGGTGTTAATCTAAACCAGTGACTATGCATTGCC
AGTTACAGTTAACTTCCAGGAAAATCTCAAAATTCAGTGCCAGTTACCT
GGTAGATTGTAATCAGTTAAGCAAAAAGCCAAATACAAGCCATTCACCT
TACAGAGAGAGAAGCATATTCACCTTACAGAGAGAGAAGCATAAATGAG
AAACACATCATCATTGTCACAGTAACTGTGGTAACCTATTGTAAAAGAT
TCACAGTGCAAAAGAGCCTGACTACATATTACAGTGGGTAAAATGGATC
GGTCTTGTA

[0718] In one embodiment, the homology arm comprises, e.g., consists of, the sequence below (SEQ ID NO: 125):

TGAGGGGAAAATAGATACATGTTATATATATATATATATATATATATGT
TCTATACCAACAAAGGGTTCAGGGTATAATTTTGCATGTAAAGGGGTGA
CCCAGAGTAGAGATAAAGAACAAAATATTCTGTTGAAAAAACTATGAAT
CAATCAACCTAATGAATTATCAACATGGATGTAGGTGTAGTTGAAGAAG
ATGGTCAGTGAGAATATGGAAACAGATATCAGGAATTAAAGTCATATTC
TAGGGCAGAAAAGCATTCATGGAGGTATTAGATGATAGCTGAAGTAATT
TGAAGAAGCTGGTGTGAA

[0719] In one embodiment, the first homology arm comprises SEQ ID NO: 124, and the second homology arm comprises SEQ ID NO: 125. In embodiments, a template nucleic acid comprising homology arms comprising SEQ ID NO: 124 and/or SEQ ID NO: 125 is used in conjunction with a CRISPR system comprising a gRNA molecule comprising SEQ ID NO: 10148, 10149 or 10206. In embodiments, a template nucleic acid comprising homology arms comprising SEQ ID NO: 124 and/or SEQ ID NO: 125 is used in conjunction with a CRISPR system comprising a gRNA molecule comprising SEQ ID NO: 10148 or 10149. In embodiments the template nucleic acid is comprised in an AAV vector, e.g., an AAV6 vector.

[0720] Exemplary homology arm lengths include at least about 25, 50, 100, 200, 250, 500, 750, 1000, or 1500 nucleotides. In some embodiments, a homology arm length of about 200 nucleotides or less may be used, e.g., if there are regions of repeats present within the genomic region of homology which would otherwise be targeted by a longer homology arm. “Target position,” as used herein, refers to a site on a target nucleic acid (e.g., the chromosome) that is modified by a Cas9 molecule-dependent process. For example, the target position can be a modified Cas9 molecule cleavage of the target nucleic acid and template nucleic acid directed modification, e.g., correction or insertion, of the target position. In an embodiment, a target position can be a site between two nucleotides, e.g., adjacent nucleotides, on the target nucleic acid into which one or more nucleotides is added. The target position may comprise one or more nucleotides that are altered, e.g., corrected, by a template nucleic acid. In an embodiment, the target position is within a target sequence (e.g., the sequence to which the gRNA binds). In an embodiment, a target position is upstream or downstream of a target sequence (e.g., the sequence to which the gRNA binds).

[0721] Typically, the template sequence undergoes a breakage mediated or catalyzed recombination with the target sequence. In an embodiment, the template nucleic acid includes sequence that corresponds to a site on the target sequence that is cleaved by a Cas9 mediated cleavage event. In an embodiment, the template nucleic acid includes sequence that corresponds to both a first site on the target sequence that is cleaved in a first Cas9 mediated event, and a second site on the target sequence that is cleaved in a second Cas9 mediated event.

[0722] In an embodiment, the template nucleic acid can include sequence which results in an alteration in the coding sequence of a translated sequence, e.g., one which results in the substitution of one amino acid for another in a protein product, e.g., transforming a mutant allele into a wild type allele, transforming a wild type allele into a mutant allele, and/or introducing a stop codon, insertion of an amino acid residue, deletion of an amino acid residue, or a nonsense mutation.

[0723] In other embodiments, the template nucleic acid can include sequence which results in an alteration in a coding sequence, e.g., in an exon, or non-coding sequence, e.g., an alteration in an intron or in a 5′ or 3′ non-translated or non-transcribed region. Such alterations include an alteration in a control element, e.g., a promoter, enhancer, and an alteration in a cis-acting or trans-acting control element. In some embodiments, the alteration includes the insertion of nucleic acid sequence, e.g., nucleic acid sequence encoding a heterologous protein, e.g., a CAR, e.g., as described herein, at or near the target sequence, e.g., the target sequence recognized by a gRNA molecule described herein.

[0724] The template nucleic acid can include sequence which, when integrated, results in:
[0725] decreasing the activity of a positive control element;
[0726] increasing the activity of a positive control element;
[0727] decreasing the activity of a negative control element;
[0728] increasing the activity of a negative control element;
[0729] decreasing the expression of a gene;
[0730] increasing the expression of a gene;
[0731] increasing resistance to a disorder or disease;
[0732] increasing resistance to viral entry;
[0733] correcting a mutation or altering an unwanted amino acid residue
[0734] conferring, increasing, abolishing or decreasing a biological property of a gene product, e.g., increasing the enzymatic activity of an enzyme, or increasing the ability of a gene product to interact with another molecule.

[0735] The template nucleic acid can include sequence which results in:
[0736] a change in sequence of 1, 2, 3, 4, 5, 6, 7, 8, 9, 10, 11, 12 or more nucleotides of the target sequence.

[0737] In an embodiment, the template nucleic acid is 20+/−10, 30+/−10, 40+/−10, 50+/−10, 60+/−10, 70+/−10, 80+/−10, 90+/−10, 100+/−10, 1 10+/−10, 120+/−10, 130+/−10, 140+/−10, 150+/−10, 160+/−10, 170+/−10, 1 80+/−10, 190+/−10, 200+/−10, 210+/−10, 220+/−10, 200-300, 300-400, 400-500, 500-600, 600-700, 700-800, 800-900, 900-1000, 1000-2000, 2000-3000 or more than 3000 nucleotides in length.

[0738] A template nucleic acid comprises the following components:
[0739] [5′ homology arm]-[insertion sequence]-[3′ homology arm].

[0740] The homology arms provide for recombination into the chromosome, which can replace the undesired element, e.g., a mutation or signature, with the replacement sequence, or insert the desired sequence. In an embodiment, the homology arms flank the most distal cleavage sites.

[0741] In an embodiment, 3′ end of 5′ homology arm is the position next to 5′ end of the replacement sequence. In an embodiment, 5′ homology arm can extend at least 10, 20, 30, 40, 50, 60, 70, 80, 90, 100, 120, 150, 180, 200, 300, 400, 500, 600, 700, 800, 900, 1000, 1500, or 2000 nucleotides 5′ from the 5′ end of the replacement sequence.

[0742] In an embodiment, 5′ end of 3′ homology arm is the position next to 3′ end of the replacement sequence. In an embodiment, 3′ homology arm can extend at least 10, 20, 30, 40, 50, 60, 70, 80, 90, 100, 120, 150, 180, 200, 300, 400, 500, 600, 700, 800, 900, 1000, 1500, or 2000 nucleotides 3′ from 3′ end of the replacement sequence.

[0743] It is contemplated herein that one or both homology arms may be shortened to avoid including certain sequence repeat elements, e.g., Alu repeats, LINE elements. For example, a 5′ homology arm may be shortened to avoid a sequence repeat element. In other embodiments, a 3′ homology arm may be shortened to avoid a sequence repeat element. In some embodiments, both 5′ and 3′ homology arms may be shortened to avoid including certain sequence repeat elements.

[0744] It is contemplated herein that template nucleic acids for correcting a mutation may designed for use as a single-stranded oligonucleotide (ssODN). When using a ssODN, 5′ and 3′ homology arms may range up to about 200 base pairs (bp) in length, e.g., at least 25, 50, 75, 100, 125, 150, 175, or 200 bp in length. Longer homology arms are also contemplated for ssODNs as improvements in oligonucleotide synthesis continue to be made.

[0745] In one aspect, the insertion sequence comprises nucleic acid sequence that encodes a chimeric antigen receptor, e.g., as described herein. In one embodiment the insertion sequence further comprises a promotor operably linked to the nucleic acid sequence encoding a chimeric antigen receptor, e.g., an EF-1 alpha promoter. In one aspect, the insertion sequence comprises a vector encoding a chimeric antigen receptor, e.g., as described herein, or a portion thereof.

### NHEJ Approaches for Gene Targeting

[0746] As described herein, nuclease-induced non-homologous end-joining (NHEJ) can be used to target gene-specific knockouts. Nuclease-induced NHEJ can also be used to remove (e.g., delete) sequence in a gene of interest.

[0747] While not wishing to be bound by theory, it is believed that, in an embodiment, the genomic alterations associated with the methods described herein rely on nuclease-induced NHEJ and the error-prone nature of the NHEJ repair pathway. NHEJ repairs a double-strand break in the DNA by joining together the two ends; however, generally, the original sequence is restored only if two compatible ends, exactly as they were formed by the double-strand break, are perfectly ligated. The DNA ends of the double-strand break are frequently the subject of enzymatic processing, resulting in the addition or removal of nucleotides, at one or both strands, prior to rejoining of the ends. This results in the presence of insertion and/or deletion (indel) mutations in the DNA sequence at the site of the NHEJ repair. Two-thirds of these mutations may alter the reading frame and, therefore, produce a non-functional protein. Additionally, mutations that maintain the reading frame, but which insert or delete a significant amount of sequence, can destroy functionality of the protein. This is locus dependent as mutations in critical functional domains are likely less tolerable than mutations in non-critical regions of the protein.

[0748] The indel mutations generated by NHEJ are unpredictable in nature; however, at a given break site certain indel sequences are favored and are over represented in the population. The lengths of deletions can vary widely; most commonly in the 1-50 bp range, but they can easily reach greater than 100-200 bp. Insertions tend to be shorter and often include short duplications of the sequence immediately surrounding the break site. However, it is possible to obtain large insertions, and in these cases, the inserted sequence has often been traced to other regions of the genome or to plasmid DNA present in the cells.

[0749] Because NHEJ is a mutagenic process, it can also be used to delete small sequence motifs as long as the generation of a specific final sequence is not required. If a double-strand break is targeted near to a short target sequence, the deletion mutations caused by the NHEJ repair often span, and therefore remove, the unwanted nucleotides. For the deletion of larger DNA segments, introducing two double-strand breaks, one on each side of the sequence, can result in NHEJ between the ends with removal of the entire intervening sequence. Both of these approaches can be used to delete specific DNA sequences; however, the error-prone nature of NHEJ may still produce indel mutations at the site of repair.

[0750] Both double strand cleaving Cas9 molecules and single strand, or nickase, Cas9 molecules can be used in the methods and compositions described herein to generate NHEJ-mediated indels. NHEJ-mediated indels targeted to the gene, e.g., a coding region, e.g., an early coding region of a gene of interest can be used to knockout (i.e., eliminate expression of) a gene of interest. For example, early coding region of a gene of interest includes sequence immediately following a transcription start site, within a first exon of the coding sequence, or within 500 bp of the transcription start site (e.g., less than 500, 450, 400, 350, 300, 250, 200, 150, 100 or 50 bp).

### Placement of Double Strand or Single Strand Breaks Relative to the Target Position

[0751] In an embodiment, in which a gRNA and Cas9 nuclease generate a double strand break for the purpose of inducing NHEJ-mediated indels, a gRNA, e.g., a unimolecular (or chimeric) or modular gRNA molecule, is configured to position one double-strand break in close proximity to a nucleotide of the target position. In an embodiment, the cleavage site is between 0-500 bp away from the target position (e.g., less than 500, 400, 300, 200, 100, 50, 40, 30, 25, 20, 15, 10, 9, 8, 7, 6, 5, 4, 3, 2 or 1 bp from the target position).

[0752] In an embodiment, in which two gRNAs complexing with Cas9 nickases induce two single strand breaks for the purpose of inducing NHEJ-mediated indels, two gRNAs, e.g., independently, unimolecular (or chimeric) or modular gRNA, are configured to position two single-strand breaks to provide for NHEJ repair a nucleotide of the target position. In an embodiment, the gRNAs are configured to position cuts at the same position, or within a few nucleotides of one another, on different strands, essentially mimicking a double strand break. In an embodiment, the closer nick is between 0-30 bp away from the target position (e.g., less than 30, 25, 20, 1, 10, 9, 8, 7, 6, 5, 4, 3, 2 or 1 bp from the target position), and the two nicks are within 25-55 bp of each other (e.g., between 25 to 50, 25 to 45, 25 to 40, 25 to 35, 25 to 30, 50 to 55, 45 to 55, 40 to 55, 35 to 55, 30 to 55, 30 to 50, 35 to 50, 40 to 50, 45 to 50, 35 to 45, or 40 to 45 bp) and no more than 100 bp away from each other (e.g., no more than 90, 80, 70, 60, 50, 40, 30, 20 or 10 bp). In an embodiment, the gRNAs are configured to place a single strand break on either side of a nucleotide of the target position.

[0753] Both double strand cleaving Cas9 molecules and single strand, or nickase, Cas9 molecules can be used in the methods and compositions described herein to generate breaks both sides of a target position. Double strand or paired single strand breaks may be generated on both sides of a target position to remove the nucleic acid sequence between the two cuts (e.g., the region between the two breaks is deleted). In one embodiment, two gRNAs, e.g., independently, unimolecular (or chimeric) or modular gRNA, are configured to position a double-strand break on both sides of a target position (e.g., the first gRNA is used to target upstream (i.e., 5′) of the mutation in a gene or pathway described herein, and the second gRNA is used to target downstream (i.e., 3′) of the mutation in a gene or pathway described herein). In an alternate embodiment, three gRNAs, e.g., independently, unimolecular (or chimeric) or modular gRNA, are configured to position a double strand break (i.e., one gRNA complexes with a Cas9 nuclease) and two single strand breaks or paired single stranded breaks (i.e., two gRNAs complex with Cas9 nickases) on either side of a target position (e.g., the first gRNA is used to target upstream (i.e., 5′) of the mutation in a gene or pathway described herein, and the second gRNA is used to target downstream (i.e., 3′) of the mutation in a gene or pathway described herein). In another embodiment, four gRNAs, e.g., independently, unimolecular (or chimeric) or modular gRNA, are configured to generate two pairs of single stranded breaks (i.e., two pairs of two gRNAs complex with Cas9 nickases) on either side of the target position (e.g., the first gRNA is used to target upstream (i.e., 5′) of the mutation in a gene or pathway described herein, and the second gRNA is used to target downstream (i.e., 3′) of the mutation in a gene or pathway described herein). The double strand break(s) or the closer of the two single strand nicks in a pair will ideally be within 0-500 bp of the target position (e.g., no more than 450, 400, 350, 300, 250, 200, 150, 100, 50 or 25 bp from the target position). When nickases are used, the two nicks in a pair are within 25-55 bp of each other (e.g., between 25 to 50, 25 to 45, 25 to 40, 25 to 35, 25 to 30, 50 to 55, 45 to 55, 40 to 55, 35 to 55, 30 to 55, 30 to 50, 35 to 50, 40 to 50, 45 to 50, 35 to 45, or 40 to 45 bp) and no more than 100 bp away from each other (e.g., no more than 90, 80, 70, 60, 50, 40, 30, 20 or 10 bp).

[0754] Thus, in a specific embodiment, the disclosure provides a method of manufacturing a cell, e.g., an immune effector cell, e.g., a T cell, e.g., as described herein, for adoptive immunotherapy, the method comprising:
[0755] a) Introducing into said cell 1) a gRNA molecule (e.g., a CRISPR system comprising said gRNA molecule) described herein, e.g., a gRNA molecule to a tet intron or intron-exon junction, e.g., tet2 intron or intron-exon junction, e.g., a gRNA molecule comprising a targeting domain in Table 1 or Table 2 and 2) a template nucleic acid, e.g., a template nucleic acid comprising nucleic acid sequence encoding a CAR (e.g., as described herein);

[0756] Wherein at least a portion of the template nucleic acid (e.g., the nucleic acid sequence encoding a CAR) integrates into the genome of said cell within a tet, e.g., tet2 intron (e.g., at or near the target sequence of the tet, e.g., tet2 gRNA molecule).

[0757] In some embodiments, the template nucleic acid sequence for targeting a TET2 intron or intron-exon junction comprises a nucleic acid sequence encoding a CAR selected from CD19 CAR, BCMA CAR, and CD22 CAR (e.g., as described herein); the template nucleic acid sequence further comprises a first homology arm comprising SEQ ID NO: 124 and a second homology arm comprising SEQ ID NO: 125; and the gRNA molecule is selected from a gRNA comprising a targeting domain complementary to a sequence within a genomic region (according to hg38) of chr4: 105269748-105272563, e.g., chr4: 105270624-105270643, chr4: 105270630-105270649, chr4: 105271863-105271883.

[0758] In some embodiments, the template nucleic acid sequence for targeting a TET2 intron or intron-exon junction comprises a first homology arm comprising SEQ ID NO: 124 and a second homology arm comprising SEQ ID NO: 125; and the gRNA molecule is selected from a gRNA comprising a targeting domain complementary to a sequence within a genomic region (according to hg38) of chr4: 105269748-105272563, e.g., chr4: 105270624-105270643, chr4: 105270630-105270649, chr4: 105271863-105271883.

[0759] In some embodiments, the template nucleic acid sequence for targeting a TET2 intron or intron-exon junction comprises a nucleic acid sequence encoding a CAR selected from CD19 CAR, BCMA CAR, and CD22 CAR (e.g., as described herein); and the gRNA molecule is selected from a gRNA comprising a targeting domain complementary to a sequence within a genomic region (according to hg38) of chr4: 105269748-105272563, e.g., chr4: 105270624-105270643, chr4: 105270630-105270649, chr4: 105271863-105271883.

[0760] In some embodiments, the template nucleic acid sequence for targeting a TET2 intron or intron-exon junction is provided on an AAV6 vector; the template nucleic acid sequence comprises a nucleic acid sequence encoding a CAR selected from CD19, BCMA, and CD22; the template nucleic acid sequence further comprises a first homology arm comprising SEQ ID NO: 124 and a second homology arm comprising SEQ ID NO: 125; and the gRNA molecule is selected from a gRNA comprising a targeting domain complementary to a sequence within a genomic region (according to hg38) of chr4: 105269748-105272563, e.g., chr4: 105270624-105270643, chr4: 105270630-105270649, chr4: 105271863-105271883.

[0761] In some embodiments, the template nucleic acid sequence for targeting a TET2 intron or intron-exon junction is provided on an AAV6 vector; the template nucleic acid sequence comprises a first homology arm comprising SEQ ID NO: 124 and a second homology arm comprising SEQ ID NO: 125; and the gRNA molecule is selected from a gRNA comprising a targeting domain complementary to a sequence within a genomic region (according to hg38) of chr4: 105269748-105272563, e.g., chr4: 105270624-105270643, chr4: 105270630-105270649, chr4: 105271863-105271883.

[0762] In some embodiments, the template nucleic acid sequence for targeting a TET2 intron or intron-exon junction is provided on an AAV6 vector; the template nucleic acid sequence comprises a nucleic acid sequence encoding a CAR selected from CD19 CAR, BCMA CAR, and CD22 CAR (e.g., as described herein); and the gRNA molecule is selected from a gRNA comprising a targeting domain complementary to a sequence within a genomic region (according to hg38) of chr4: 105269748-105272563, e.g., chr4: 105270624-105270643, chr4: 105270630-105270649, chr4: 105271863-105271883.

[0763] In some embodiments, the template nucleic acid sequence for targeting a TET2 intron or intron-exon junction is provided on an AAV6 vector; and the gRNA molecule is selected from a gRNA comprising a targeting domain complementary to a sequence within a genomic region (according to hg38) of chr4: 105269748-105272563, e.g., chr4: 105270624-105270643, chr4: 105270630-105270649, chr4: 105271863-105271883.

[0764] In some embodiments, the template nucleic acid sequence for targeting a TET2 intron or intron-exon junction comprises a nucleic acid sequence encoding a CAR selected from CD19 CAR, BCMA CAR, and CD22 CAR (e.g., as described herein); the template nucleic acid sequence further comprises a first homology arm comprising SEQ ID NO: 124 and a second homology arm comprising SEQ ID NO: 125; and the gRNA molecule is selected from a gRNA comprising a targeting domain of any of the sequences in Table 1 or Table 2, e.g., SEQ ID NO: 10148, SEQ ID NO: 10149, SEQ ID NO: 10206, e.g., SEQ ID NO: 10148 or SEQ ID NO: 10149.

[0765] In some embodiments, the template nucleic acid sequence for targeting a TET2 intron or intron-exon junction comprises a first homology arm comprising SEQ ID NO: 124 and a second homology arm comprising SEQ ID NO: 125; and the gRNA molecule is selected from a gRNA comprising a targeting domain of any of the sequences in Table 1 or Table 2, e.g., SEQ ID NO: 10148, SEQ ID NO: 10149, SEQ ID NO: 10206.

[0766] In some embodiments, the template nucleic acid sequence for targeting a TET2 intron or intron-exon junction comprises a nucleic acid sequence encoding a CAR selected from CD19 CAR, BCMA CAR, and CD22 CAR (e.g., as described herein); and the gRNA molecule is selected from a gRNA comprising a targeting domain of any of the sequences in Table 1 or Table 2.

[0767] In some embodiments, the template nucleic acid sequence for targeting a TET2 intron or intron-exon junction is provided on an AAV6 vector; the template nucleic acid sequence comprises a nucleic acid sequence encoding a CAR selected from CD19, BCMA, and CD22; the template nucleic acid sequence further comprises a first homology arm comprising SEQ ID NO: 124 and a second homology arm comprising SEQ ID NO: 125; and the gRNA molecule is selected from a gRNA comprising a targeting domain of any of the sequences in Table 1 or Table 2, e.g., SEQ ID NO: 10148, SEQ ID NO: 10149, SEQ ID NO: 10206.

[0768] In some embodiments, the template nucleic acid sequence for targeting a TET2 intron or intron-exon junction is provided on an AAV6 vector; the template nucleic acid sequence comprises a first homology arm comprising SEQ ID NO: 124 and a second homology arm comprising SEQ ID NO: 125; and the gRNA molecule is selected from a gRNA comprising a targeting domain of any of the sequences in Table 1 or Table 2, e.g., SEQ ID NO: 10148, SEQ ID NO: 10149, SEQ ID NO: 10206.

[0769] In some embodiments, the template nucleic acid sequence for targeting a TET2 intron or intron-exon junction is provided on an AAV6 vector; the template nucleic acid sequence comprises a nucleic acid sequence encoding a CAR selected from CD19 CAR, BCMA CAR, and CD22 CAR (e.g., as described herein); and the gRNA molecule is selected from a gRNA comprising a targeting domain of any of the sequences in Table 1 or Table 2, e.g., SEQ ID NO: 10148, SEQ ID NO: 10149, SEQ ID NO: 10206.

[0770] In some embodiments, the template nucleic acid sequence for targeting a TET2 intron or intron-exon junction is provided on an AAV6 vector; and the gRNA molecule is selected from a gRNA comprising a targeting domain of any of the sequences in Table 1 or Table 2, e.g., SEQ ID NO: 10148, SEQ ID NO: 10149, SEQ ID NO: 10206.

[0771] In some embodiments, the template nucleic acid comprises SEQ ID NO: 126. In some embodiments, the template nucleic acid comprises SEQ ID NO: 126 and is provided on an AAV vector, e.g., an AAV6 vector. In some embodiments, the template nucleic acid comprises SEQ ID NO: 126 and is provided on an AAV vector, e.g., an AAV6 vector, and the gRNA molecule is selected from a gRNA comprising a targeting domain of any of the sequences in Table 1 or Table 2, e.g., SEQ ID NO: 10148, SEQ ID NO: 10149, SEQ ID NO: 10206, e.g., selected from SEQ ID NO: 10148 and SEQ ID NO: 10149.

[0772] In some embodiments, a gRNA molecule described herein and a Cas9 molecule described herein are mixed to form a ribonuclear protein complex (RNP); next the RNP is introduced to a cell described herein; and then the cell is introduced to the vector described herein, e.g., AAV6.

[0773] In some embodiments, the gRNA molecules disclosed herein are capable of generating the editing repair pattern described in Table 22 and/or the indel frequencies described in Table 23.

[0774] The disclosure also provides cells that comprise or at one time comprised one or more gRNA molecules disclosed herein, and exhibit or at one time exhibited the editing repair pattern described in Table 22 and/or the indel frequencies described in Table 23.

VIII. Systems Comprising More than One gRNA Molecule

[0775] While not intending to be bound by theory, targeting of two target sequences (e.g., by two gRNA molecule/Cas9 molecule complexes which each induce a single- or double-strand break at or near their respective target sequences) located in close proximity on a continuous nucleic acid induces excision (e.g., deletion) of the nucleic acid sequence (or at least 80%, 85%, 90%, 95%, 96%, 97%, 98%, 99% of the nucleic acid sequence) located between the two target sequences. In some aspects, the present disclosure provides for the use of two or more gRNA molecules that comprise targeting domains targeting target sequences in close proximity on a continuous nucleic acid, e.g., a chromosome, e.g., a gene or gene locus, including its introns, exons and regulatory elements. The use may be, for example, by introduction of the two or more gRNA molecules, together with one or more Cas9 molecules (or nucleic acid encoding the two or more gRNA molecules and/or the one or more Cas9 molecules) into a cell. Such systems may be used, for example, to insert heterologous nucleic acid sequence, e.g., sequence from a template nucleic acid, e.g., sequence encoding a CAR (e.g., as described herein) into the site of the excision.

[0776] In some aspects, the target sequences of the two or more gRNA molecules are located at least 5, 6, 7, 8, 9, 10, 20, 30, 40, 50, 60, 70, 80, 90, 100, 200, 300, 400, 500, 600, 700, 800, 900, 1000, 2000, 3000, 4000, 5000, 6000, or 70000 nucleotides apart on a continuous nucleic acid, but not more than 10000 nucleotides apart on a continuous nucleic acid. In an embodiment, the target sequences are located about 4000 nucleotides apart. In an embodiment, the target sequences are located about 6000 nucleotides apart.

[0777] In some aspects, the plurality of gRNA molecules each target sequences within the same gene or gene locus. In another aspect, the plurality of gRNA molecules each target sequences within 2 or more different genes.

[0778] In some aspects, the disclosure provides compositions and cells comprising a plurality, for example, 2 or more, for example, 2, gRNA molecules of the disclosure, wherein the plurality of gRNA molecules target sequences less than 10,000, less than 9,000, less than 8,000, less than 7,000, less than 6,000, less than 5,000, less than 4,000, less than 3,000, less than 2,000, less than 1,000, less than 900, less than 800, less than 700, less than 600, less than 500, less than 400, less than 300, less than 200, less than 100, less than 90, less than 80, less than 70, less than 60, less than 50, less than 40, or less than 30 nucleotides apart. In an embodiment, the target sequences are on the same strand of duplex nucleic acid. In an embodiment, the target sequences are on different strands of duplex nucleic acid.

[0779] In one embodiment, the disclosure provides a method for excising (e.g., deleting) nucleic acid disposed between two gRNA binding sites disposed less than 10,000, less than 9,000, less than 8,000, less than 7,000, less than 6,000, less than 5,000, less than 4,000, less than 3,000, less than 2,000, less than 1,000, less than 900, less than 800, less than 700, less than 600, less than 500, less than 400, less than 300, less than 200, less than 100, less than 90, less than 80, less than 70, less than 60, less than 50, less than 40, or less than 30 nucleotides apart on the same or different strands of duplex nucleic acid. In an embodiment, the method provides for deletion of more than 50%, more than 60%, more than 70%, more than 80%, more than 85%, more than 86%, more than 87%, more than 88%, more than 89%, more than 90%, more than 91%, more than 92%, more than 93%, more than 94%, more than 95%, more than 96%, more than 97%, more than 98%, more than 99%, or 100% of the nucleotides disposed between the PAM sites associated with each gRNA binding site. In embodiments, the deletion further comprises of one or more nucleotides within one or more of the PAM sites associated with each gRNA binding site. In embodiments, the deletion also comprises one or more nucleotides outside of the region between the PAM sites associated with each gRNA binding site.

[0780] In one aspect, the two or more gRNA molecules comprise targeting domains targeting target sequences flanking a gene regulatory element, e.g., a promotor binding site, an enhancer region, or a repressor region, such that excision of the intervening sequence (or a portion of the intervening sequence) causes up- or down-regulation of a gene of interest.

[0781] In an embodiment, the two or more gRNA molecules are selected from the gRNA molecules of Table 1 or Table 2. In aspects, the two or more gRNA molecules comprise targeting domains that are complementary with sequences in the same gene, for example, same region, e.g., same intron.

[0782] In addition to the gRNA molecules described herein, e.g., gRNA molecules to a tet intron or intron-exon junction, e.g., tet2 intron or intron-exon junction, the CRISPR systems, cells, methods and other embodiments of the disclosure may further include one or more additional gRNA molecules, CRISPR systems or, in the case of, for example, cells, one or more alterations within other genes, for example, effected by CRISPR systems.

[0783] As described herein, when utilizing more than one gRNA molecule (or CRISPR system comprising more than one gRNA molecule, e.g., a CRISPR system comprising a first gRNA molecule and a CRISPR system comprising a second gRNA molecule, e.g., wherein each gRNA molecule is complexed with a Cas molecule, e.g., a Cas9 molecule, e.g., as described herein), the more than one gRNA molecules may be introduced into a cell simultaneously, e.g., in a single introduction step, e.g., a single electroporation step. Alternatively, the more than one gRNA molecules (or CRISPR systems comprising said gRNA molecules) can be introduced into a cell in more than one steps, e.g., more than one electroporations. If multiple introduction steps are utilized, the steps may be separated by a period of hours, days, or weeks, e.g., by a period of 1 hour, 2 hours, 5 hours, 10 hours, 15 hours, 20 hours, 24 hours, 2 days, 3, days, 4 days, 5 days, 6 days, 7 days, 8 days, 9 days, 10 days, or more.

[0784] In embodiments where template nucleic acid is utilized and it is desired to insert nucleic acid sequence only at a target sequence of one of the gRNA molecules in a system or method utilizing more than one gRNA molecule, the alteration of the cell of interest can be accomplished in stepwise fashion. For example, in a first step, a CRISPR system comprising a gRNA molecule which binds the target sequence where insertion is desired is introduced into the cell together with a template nucleic acid, e.g., as described herein. In a second step, for example, at a time when there is no longer template nucleic acid present in said cell, one or more CRISPR systems comprising one or more gRNA molecules to additional target sequences (e.g., target sequences in genes where it is desired to have reduced or eliminated function or expression of said gene or genes) are introduced. In embodiments, the first and second steps may be reversed in order. In embodiments, the second step may comprise a plurality of steps, each involving a single CRISPR system/gRNA molecule.

[0785] In a specific embodiment, the disclosure provides a method of manufacturing a cell, e.g., an immune effector cell, e.g., a T cell, e.g., as described herein, for adoptive immunotherapy, the method comprising:
[0786] a) Introducing into said cell 1) a gRNA molecule (e.g., a CRISPR system comprising said gRNA molecule) described herein, e.g., a gRNA molecule to a tet intron or intron-exon junction, e.g., tet2 intron or intron-exon junction, e.g., a gRNA molecule comprising a targeting domain in Table 1 or Table 2 and 2) a template nucleic acid, e.g., a template nucleic acid comprising nucleic acid sequence encoding a CAR (e.g., as described herein); and
[0787] b) Introducing into said cell a gRNA molecule (e.g., a CRISPR system comprising said gRNA molecule) comprising a targeting domain specific for a target sequence of a component of the T cell receptor (e.g., TRAC, TRBC, CD3E, CD3D, or CD3G), and/or introducing into said cell a gRNA molecule (e.g., a CRISPR system comprising said gRNA molecule) comprising a targeting domain specific for a target sequence of B2M and/or Introducing into said cell a gRNA molecule (e.g., a CRISPR system comprising said gRNA molecule) comprising a targeting domain specific for a target sequence of CIITA;

[0788] Wherein at least a portion of the template nucleic acid (e.g., the nucleic acid sequence encoding a CAR) integrates into the genome of said cell within a tet, e.g., tet2 intron (e.g., at or near the target sequence of the tet, e.g., tet2 gRNA molecule) and said cell has reduced or eliminated expression of a component of the T cell, B2M and/or CIITA.

[0789] In a specific embodiment, the disclosure provides a method of manufacturing a cell, e.g., an immune effector cell, e.g., a T cell, e.g., as described herein, for adoptive immunotherapy, the method comprising:
[0790] a) Introducing into said cell 1) a gRNA molecule (e.g., a CRISPR system comprising said gRNA molecule) described herein, e.g., a gRNA molecule to a tet intron or intron-exon junction, e.g., tet2 intron or intron-exon junction, e.g., a gRNA molecule comprising a targeting domain in Table 1 or Table 2 and 2) a template nucleic acid, e.g., a template nucleic acid comprising nucleic acid sequence encoding a CAR (e.g., as described herein); and
[0791] b) Introducing into said cell a gRNA molecule (e.g., a CRISPR system comprising said gRNA molecule) comprising a targeting domain specific for a target sequence of a component of the T cell receptor (e.g., TRAC, TRBC, CD3E, CD3D, or CD3G), and/or introducing into said cell a gRNA molecule (e.g., a CRISPR system comprising said gRNA molecule) comprising a targeting domain specific for a target of an immunosuppressant;

[0792] Wherein at least a portion of the template nucleic acid (e.g., the nucleic acid sequence encoding a CAR) integrates into the genome of said cell within a tet, e.g., tet2 intron (e.g., at or near the target sequence of the tet, e.g., tet2 gRNA molecule) and said cell has reduced or eliminated expression of a target for an immunosuppressant. Exemplary targets of an immunosuppressant include FKBP1A or CD52.

IX. Properties of the gRNA

[0793] While not intending to be bound by theory, gRNA molecules and CRISPR systems comprising said gRNA molecules produce similar or identical indel patterns when the same system is used in the same cell type through multiple experiments. Without being bound by theory, it is believed that some indel patterns may be more advantageous than others. For example, indels which predominantly include insertions and/or deletions which result in a “frameshift mutation” (e.g., 1- or 2-base pair insertion or deletions, or any insertion or deletion where n/3 is not a whole number (where n=the number of nucleotides in the insertion or deletion)) may be beneficial in reducing or eliminating expression of a functional protein. Likewise, indels which predominantly include “large deletions” (deletions of more than 10, 11, 12, 13, 14, 15, 20, 25, or 30 nucleotides) may also be beneficial in, for example, removing critical regulatory sequences such as promoter binding sites, which may similarly have an improved effect on expression of functional protein. While the indel patterns induced by a given gRNA/CRISPR system have surprisingly been found to be consistently reproduced across cell types, as described herein, not any single indel structure will inevitably be produced in a given cell upon introduction of a gRNA/CRISPR system. In embodiments, specific gRNAs, Cas molecules, cell types, scaffolds, etc., may be selected to affect the indel patterns induced by the CRISPR system.

[0794] The disclosure thus provides for gRNA molecules which create a beneficial indel pattern or structure, for example, which have indel patterns or structures predominantly composed of frameshift mutation(s) and/or large deletions. Such gRNA molecules may be selected by assessing the indel pattern or structure created by a candidate gRNA molecule in a test cell (for example, a HEK293 cell or in the cell of interest, e.g., a T cell) by NGS, as described herein. As shown in the Examples, gRNA molecules have been discovered, which, when introduced into the desired cell population, result in a population of cells comprising a significant fraction of the cells having a frameshift mutation in the targeted gene. In some cases, the rate of frameshift mutation is as high as 75%, 80%, 85%, 90% or more. The disclosure thus provides for populations of cells which comprise at least about 40% of cells (e.g., at least about 45%, at least about 50%, at least about 55%, at least about 60%, at least about 65%, at least about 70%, at least about 75%, at least about 80%, at least about 85%, at least about 90%, at least about 95%, or at least about 99%) having a frameshift mutation, e.g., as described herein, at or near the target site of a gRNA molecule described herein. The disclosure also provides for populations of cells which comprise at least about 50% of cells (e.g., at least about 55%, at least about 60%, at least about 65%, at least about 70%, at least about 75%, at least about 80%, at least about 85%, at least about 90%, at least about 95%, or at least about 99%) having a frameshift mutation, e.g., as described herein, at or near the target site of a gRNA molecule described herein.

[0795] The disclosure thus provides methods of selecting gRNA molecules for use in the therapeutic methods of the disclosure comprising: 1) providing a plurality of gRNA molecules to a target of interest, 2) assessing the indel pattern or structure created by use of said gRNA molecules, 3) selecting a gRNA molecule that forms an indel pattern or structure composed predominantly of frameshift mutations, large deletions or a combination thereof, and 4) using said selected gRNA in a methods of the disclosure.

[0796] The disclosure further provides methods of altering cells, and altered cells, wherein a particular indel pattern is consistently produced with a given gRNA/CRISPR system in that cell type.

[0797] It may also be beneficial to utilize gRNA molecules that do not create indels at off-target sequences within the genome of the target cell type, or produce indels at off target sites at very low frequencies (e.g., <5% of cells within a population) relative to the frequency of indel creation at the target site. Thus, the disclosure provides for gRNA molecules and CRISPR systems which do not exhibit off-target indel formation in the target cell type, or which produce a frequency of off-target indel formation of <5%. In embodiments, the disclosure provides gRNA molecules and CRISPR systems which do not exhibit any off target indel formation in the target cell type. Thus, the disclosure further provides a cell, e.g., a population of cells, e.g., immune effector cells, e.g., CAR-expressing immune effector cells, e.g., as described herein, which comprise an indel at or near a target site of a gRNA molecule described herein (e.g., a frameshift indel, or any one of the top 5 indels produced by a given gRNA/CRISPR system, e.g., as described herein), but does not comprise an indel at any off-target site of the gRNA molecule. In other embodiments, the disclosure further provides a population of cells, e.g., immune effector cells, e.g., CAR-expressing immune effector cells, e.g., as described herein, which comprises >50% of cells which have an indel at or near a target site of a gRNA molecule described herein (e.g., a frameshift indel, or any one of the top 5 indels produced by a given gRNA/CRISPR system, e.g., as described herein), but which comprises less than 5%, e.g., less than 4%, less than 3%, less than 2% or less than 1%, of cells comprising an indel at any off-target site of the gRNA molecule.

### X. Delivery/Constructs

[0798] The components, e.g., a Cas9 molecule, gRNA molecule and/or template nucleic acid, or combinations thereof, can be delivered, formulated, or administered in a variety of forms. As a non-limiting example, the gRNA molecule and Cas9 molecule can be formulated (in one or more compositions), directly delivered or administered to a cell in which a genome editing event is desired. Alternatively, nucleic acid encoding one or more components, e.g., a Cas9 molecule or gRNA molecule, or both, can be formulated (in one or more compositions), delivered or administered. In one aspect, the gRNA molecule is provided as DNA encoding the gRNA molecule and the Cas9 molecule is provided as DNA encoding the Cas9 molecule. In one embodiment, the gRNA molecule and Cas9 molecule are encoded on separate nucleic acid molecules. In one embodiment, the gRNA molecule and Cas9 molecule are encoded on the same nucleic acid molecule. In one aspect, the gRNA molecule is provided as RNA and the Cas9 molecule is provided as DNA encoding the Cas9 molecule. In one embodiment, the gRNA molecule is provided with one or more modifications, e.g., as described herein. In one aspect, the gRNA molecule is provided as RNA and the Cas9 molecule is provided as mRNA encoding the Cas9 molecule. In one aspect, the gRNA molecule is provided as RNA and the Cas9 molecule is provided as a protein. In one embodiment, the gRNA and Cas9 molecule are provided as a ribonuclear protein complex (RNP). In one aspect, the gRNA molecule is provided as DNA encoding the gRNA molecule and the Cas9 molecule is provided as a protein. In any of the aforementioned embodiments, the composition may further include a template nucleic acid.

[0799] Delivery may be accomplished by, for example, electroporation (e.g., as known in the art) or other method that renders the cell membrane permeable to nucleic acid and/or polypeptide molecules. Additional techniques for rendering the membrane permeable are known in the art and include, for example, cell squeezing (e.g., as described in WO2015/023982 and WO2013/059343, the contents of which are hereby incorporated by reference in their entirety), nanoneedles (e.g., as described in Chiappini et al., Nat. Mat., 14; 532-39, or US2014/0295558, the contents of which are hereby incorporated by reference in their entirety) and nanostraws (e.g., as described in Xie, ACS Nano, 7 (5); 4351-58, the contents of which are hereby incorporated by reference in their entirety).

[0800] When a component is delivered encoded in DNA the DNA will typically include a control region, e.g., comprising a promoter, to effect expression. Useful promoters for Cas9 molecule sequences include CMV, EF-lalpha, MSCV, PGK, CAG control promoters. Useful promoters for gRNAs include H1, EF-la and U6 promoters. Promoters with similar or dissimilar strengths can be selected to tune the expression of components. Sequences encoding a Cas9 molecule can comprise a nuclear localization signal (NLS), e.g., an SV40 NLS. In an embodiment, a promoter for a Cas9 molecule or a gRNA molecule can be, independently, inducible, tissue specific, or cell specific.

DNA-Based Delivery of a Cas9 Molecule and or a gRNA Molecule

[0801] DNA encoding Cas9 molecules and/or gRNA molecules, can be administered to subjects or delivered into cells by art-known methods or as described herein. For example, Cas9-encoding and/or gRNA-encoding DNA can be delivered, e.g., by vectors (e.g., viral or non-viral vectors), non-vector based methods (e.g., using naked DNA or DNA complexes), or a combination thereof.

[0802] In some embodiments, the Cas9- and/or gRNA-encoding DNA is delivered by a vector (e.g., viral vector/virus, plasmid, minicircle or nanoplasmid). In some embodiments, the Cas9- and/or gRNA-encoding DNA is delivered by at least one vector. For example, the Cas9 is delivered by a vector that is different than the vector by which the gRNA-encoding DNA is delivered.

[0803] A vector can comprise a sequence that encodes a Cas9 molecule and/or a gRNA molecule. A vector can also comprise a sequence encoding a signal peptide (e.g., for nuclear localization, nucleolar localization, mitochondrial localization), fused, e.g., to a Cas9 molecule sequence. For example, a vector can comprise one or more nuclear localization sequence (e.g., from SV40) fused to the sequence encoding the Cas9 molecule.

[0804] One or more regulatory/control elements, e.g., a promoter, an enhancer, an intron, a polyadenylation signal, a Kozak consensus sequence, internal ribosome entry sites (IRES), a 2A sequence, and a splice acceptor or donor can be included in the vectors. In some embodiments, the promoter is recognized by RNA polymerase II (e.g., a CMV promoter). In other embodiments, the promoter is recognized by RNA polymerase III (e.g., a U6 promoter). In some embodiments, the promoter is a regulated promoter (e.g., inducible promoter). In other embodiments, the promoter is a constitutive promoter. In some embodiments, the promoter is a tissue specific promoter. In some embodiments, the promoter is a viral promoter. In other embodiments, the promoter is a non-viral promoter.

[0805] In some embodiments, the vector or delivery vehicle is a minicircle. In some embodiments, the vector or delivery vehicle is a nanoplasmid.

[0806] In some embodiments, the vector or delivery vehicle is a viral vector (e.g., for generation of recombinant viruses). In some embodiments, the virus is a DNA virus (e.g., dsDNA or ssDNA virus). In other embodiments, the virus is an RNA virus (e.g., an ssRNA virus).

[0807] Exemplary viral vectors/viruses include, e.g., retroviruses, lentiviruses, adenovirus, adeno-associated virus (AAV), vaccinia viruses, poxviruses, and herpes simplex viruses. Viral vector technology is well known in the art and is described, for example, in Sambrook et al., 2012, MOLECULAR CLONING: A LABORATORY MANUAL, volumes 1-4, Cold Spring Harbor Press, NY), and in other virology and molecular biology manuals.

[0808] In some embodiments, the virus infects dividing cells. In other embodiments, the virus infects non-dividing cells. In some embodiments, the virus infects both dividing and non-dividing cells. In some embodiments, the virus can integrate into the host genome. In some embodiments, the virus is engineered to have reduced immunity, e.g., in human. In some embodiments, the virus is replication-competent. In other embodiments, the virus is replication-defective, e.g., having one or more coding regions for the genes necessary for additional rounds of virion replication and/or packaging replaced with other genes or deleted. In some embodiments, the virus causes transient expression of the Cas9 molecule and/or the gRNA molecule. In other embodiments, the virus causes long-lasting, e.g., at least 1 week, 2 weeks, 1 month, 2 months, 3 months, 6 months, 9 months, 1 year, 2 years, or permanent expression, of the Cas9 molecule and/or the gRNA molecule. The packaging capacity of the viruses may vary, e.g., from at least about 4 kb to at least about 30 kb, e.g., at least about 5 kb, 10 kb, 15 kb, 20 kb, 25 kb, 30 kb, 35 kb, 40 kb, 45 kb, or 50 kb.

[0809] In some embodiments, the Cas9- and/or gRNA-encoding DNA is delivered by a recombinant retrovirus. In some embodiments, the retrovirus (e.g., Moloney murine leukemia vims) comprises a reverse transcriptase, e.g., that allows integration into the host genome. In some embodiments, the retrovirus is replication-competent. In other embodiments, the retrovirus is replication-defective, e.g., having one of more coding regions for the genes necessary for additional rounds of virion replication and packaging replaced with other genes, or deleted.

[0810] In some embodiments, the Cas9- and/or gRNA-encoding DNA is delivered by a recombinant lentivirus. For example, the lentivirus is replication-defective, e.g., does not comprise one or more genes required for viral replication.

[0811] In some embodiments, the Cas9- and/or gRNA-encoding DNA is delivered by a recombinant adenovirus. In some embodiments, the adenovirus is engineered to have reduced immunity in human.

[0812] In some embodiments, the Cas9- and/or gRNA-encoding DNA and/or template nucleic acid is delivered by a recombinant AAV. In some embodiments, the AAV can incorporate its genome into that of a host cell, e.g., a target cell as described herein. In some embodiments, the AAV is a self-complementary adeno-associated virus (scAAV), e.g., a scAAV that packages both strands which anneal together to form double stranded DNA. AAV serotypes that may be used in the disclosed methods include, e.g., AAV1, AAV2, modified AAV2 (e.g., modifications at Y444F, Y500F, Y730F and/or S662V), AAV3, modified AAV3 (e.g., modifications at Y705F, Y731F and/or T492V), AAV4, AAV5, AAV6, modified AAV6 (e.g., modifications at S663V and/or T492V), AAV8, AAV8.2, AAV9, AAVrh10, and pseudotyped AAV, such as AAV2/8, AAV2/5 and AAV2/6 can also be used in the disclosed methods. In some embodiments, the recombinant AAV is AAV6.

[0813] In some embodiments, the Cas9- and/or gRNA-encoding DNA is delivered by a hybrid virus, e.g., a hybrid of one or more of the viruses described herein.

[0814] A packaging cell is used to form a virus particle that is capable of infecting a host or target cell. Such a cell includes a 293 cell, which can package adenovirus, and a w2 cell or a PA317 cell, which can package retrovirus. A viral vector used in gene therapy is usually generated by a producer cell line that packages a nucleic acid vector into a viral particle. The vector typically contains the minimal viral sequences required for packaging and subsequent integration into a host or target cell (if applicable), with other viral sequences being replaced by an expression cassette encoding the protein to be expressed. For example, an AAV vector used in gene therapy typically only possesses inverted terminal repeat (ITR) sequences from the AAV genome which are required for packaging and gene expression in the host or target cell. The missing viral functions are supplied in trans by the packaging cell line. Henceforth, the viral DNA is packaged in a cell line, which contains a helper plasmid encoding the other AAV genes, namely rep and cap, but lacking ITR sequences. The cell line is also infected with adenovirus as a helper. The helper virus promotes replication of the AAV vector and expression of AAV genes from the helper plasmid. The helper plasmid is not packaged in significant amounts due to a lack of ITR sequences. Contamination with adenovirus can be reduced by, e.g., heat treatment to which adenovirus is more sensitive than AAV.

[0815] In an embodiment, the viral vector has the ability of cell type and/or tissue type recognition. For example, the viral vector can be pseudotyped with a different/alternative viral envelope glycoprotein; engineered with a cell type-specific receptor (e.g., genetic modification of the viral envelope glycoproteins to incorporate targeting ligands such as a peptide ligand, a single chain antibody, a growth factor); and/or engineered to have a molecular bridge with dual specificities with one end recognizing a viral glycoprotein and the other end recognizing a moiety of the target cell surface (e.g., ligand-receptor, monoclonal antibody, avidin-biotin and chemical conjugation).

[0816] In an embodiment, the viral vector achieves cell type specific expression. For example, a tissue-specific promoter can be constructed to restrict expression of the transgene (Cas9 and gRNA) in only the target cell. The specificity of the vector can also be mediated by microRNA-dependent control of transgene expression. In an embodiment, the viral vector has increased efficiency of fusion of the viral vector and a target cell membrane. For example, a fusion protein such as fusion-competent hemagglutin (HA) can be incorporated to increase viral uptake into cells. In an embodiment, the viral vector has the ability of nuclear localization. For example, a virus that requires the breakdown of the cell wall (during cell division) and therefore will not infect a non-diving cell can be altered to incorporate a nuclear localization peptide in the matrix protein of the virus thereby enabling the transduction of non-proliferating cells.

[0817] In some embodiments, the Cas9- and/or gRNA-encoding DNA is delivered by a non-vector based method (e.g., using naked DNA or DNA complexes). For example, the DNA can be delivered, e.g., by organically modified silica or silicate (Ormosil), electroporation, gene gun, sonoporation, magnetofection, lipid-mediated transfection, dendrimers, inorganic nanoparticles, calcium phosphates, or a combination thereof.

[0818] In some embodiments, the Cas9- and/or gRNA-encoding DNA is delivered by a combination of a vector and a non-vector based method. For example, a virosome comprises a liposome combined with an inactivated virus (e.g., HIV or influenza virus), which can result in more efficient gene transfer, e.g., in a respiratory epithelial cell than either a viral or a liposomal method alone.

[0819] In an embodiment, the delivery vehicle is a non-viral vector. In an embodiment, the non-viral vector is an inorganic nanoparticle (e.g., attached to the payload to the surface of the nanoparticle). Exemplary inorganic nanoparticles include, e.g., magnetic nanoparticles (e.g., Fe lvln02), or silica. The outer surface of the nanoparticle can be conjugated with a positively charged polymer (e.g., polyethylenimine, polylysine, polyserine) which allows for attachment (e.g., conjugation or entrapment) of payload. In an embodiment, the non-viral vector is an organic nanoparticle (e.g., entrapment of the payload inside the nanoparticle). Exemplary organic nanoparticles include, e.g., SNALP liposomes that contain cationic lipids together with neutral helper lipids which are coated with polyethylene glycol (PEG) and protamine and nucleic acid complex coated with lipid coating.

[0820] Exemplary lipids and/or polymers for transfer of CRISPR systems or nucleic acid, e.g., vectors, encoding CRISPR systems or components thereof include, for example, those described in WO2011/076807, WO2014/136086, WO2005/060697, WO2014/140211, WO2012/031046, WO2013/103467, WO2013/006825, WO2012/006378, WO2015/095340, and WO2015/095346, the contents of each of the foregoing are hereby incorporated by reference in their entirety. In an embodiment, the vehicle has targeting modifications to increase target cell update of nanoparticles and liposomes, e.g., cell specific antigens, monoclonal antibodies, single chain antibodies, aptamers, polymers, sugars, and cell penetrating peptides. In an embodiment, the vehicle uses fusogenic and endosome-destabilizing peptides/polymers. In an embodiment, the vehicle undergoes acid-triggered conformational changes (e.g., to accelerate endosomal escape of the cargo). In an embodiment, a stimuli-cleavable polymer is used, e.g., for release in a cellular compartment. For example, disulfide-based cationic polymers that are cleaved in the reducing cellular environment can be used.

[0821] In an embodiment, the delivery vehicle is a biological non-viral delivery vehicle. In an embodiment, the vehicle is an attenuated bacterium (e.g., naturally or artificially engineered to be invasive but attenuated to prevent pathogenesis and expressing the transgene (e.g., Listeria monocytogenes, certain Salmonella strains, Bifidobacterium longum, and modified Escherichia coli), bacteria having nutritional and tissue-specific tropism to target specific tissues, bacteria having modified surface proteins to alter target tissue specificity). In an embodiment, the vehicle is a genetically modified bacteriophage (e.g., engineered phages having large packaging capacity, less immunogenic, containing mammalian plasmid maintenance sequences and having incorporated targeting ligands). In an embodiment, the vehicle is a mammalian virus-like particle. For example, modified viral particles can be generated (e.g., by purification of the “empty” particles followed by ex vivo assembly of the virus with the desired cargo). The vehicle can also be engineered to incorporate targeting ligands to alter target tissue specificity. In an embodiment, the vehicle is a biological liposome. For example, the biological liposome is a phospholipid-based particle derived from human cells (e.g., erythrocyte ghosts, which are red blood cells broken down into spherical structures derived from the subject (e.g., tissue targeting can be achieved by attachment of various tissue or cell-specific ligands), or secretory exosomes-subject (i.e., patient) derived membrane-bound nanovesicle (30-100 nm) of endocytic origin (e.g., can be produced from various cell types and can therefore be taken up by cells without the need of for targeting ligands).

[0822] In an embodiment, one or more nucleic acid molecules (e.g., DNA molecules) other than the components of a Cas system, e.g., the Cas9 molecule component and/or the gRNA molecule component described herein, are delivered. In an embodiment, the nucleic acid molecule is delivered at the same time as one or more of the components of the Cas system are delivered. In an embodiment, the nucleic acid molecule is delivered before or after (e.g., less than about 30 minutes, 1 hour, 2 hours, 3 hours, 6 hours, 9 hours, 12 hours, 1 day, 2 days, 3 days, 1 week, 2 weeks, or 4 weeks) one or more of the components of the Cas9 system are delivered. In an embodiment, the nucleic acid molecule is delivered by a different means than one or more of the components of the Cas9 system, e.g., the Cas9 molecule component and/or the gRNA molecule component, are delivered. The nucleic acid molecule can be delivered by any of the delivery methods described herein. For example, the nucleic acid molecule can be delivered by a viral vector, e.g., an integration-deficient lentivirus, and the Cas9 molecule component and/or the gRNA molecule component can be delivered by electroporation, e.g., such that the toxicity caused by nucleic acids (e.g., DNAs) can be reduced. In an embodiment, the nucleic acid molecule encodes a therapeutic protein, e.g., a protein described herein. In an embodiment, the nucleic acid molecule encodes an RNA molecule, e.g., an RNA molecule described herein. Delivery of RNA encoding a Cas9 molecule

[0823] RNA encoding Cas9 molecules (e.g., active Cas9 molecules, inactive Cas9 molecules or inactive Cas9 fusion proteins) and/or gRNA molecules, can be delivered into cells, e.g., target cells described herein, by art-known methods or as described herein. For example, Cas9-encoding and/or gRNA-encoding RNA can be delivered, e.g., by microinjection, electroporation, lipid-mediated transfection, peptide-mediated delivery, or a combination thereof.

### Delivery of Cas9 Molecule as Protein

[0824] Cas9 molecules (e.g., active Cas9 molecules, inactive Cas9 molecules or inactive Cas9 fusion proteins) can be delivered into cells by art-known methods or as described herein. For example, Cas9 protein molecules can be delivered, e.g., by microinjection, electroporation, lipid-mediated transfection, peptide-mediated delivery, cell squeezing or abrasion (e.g., by nanoneedles) or a combination thereof. Delivery can be accompanied by DNA encoding a gRNA or by a gRNA.

[0825] In an embodiment the Cas9 molecule, e.g., as described herein, is delivered as a protein and the gRNA molecule is delivered at one or more RNAs (e.g., as a dgRNA or sgRNA, as described herein). In embodiments, the Cas9 protein is complexed with the gRNA molecule prior to delivery to a cell, e.g., as described herein, as a ribonuclear protein complex (“RNP”). In embodiments, the RNP can be delivered into cells, e.g., described herein, by any art-known method, e.g., electroporation. As described herein, and without being bound by theory, it can be preferable to use a gRNA molecule and Cas9 molecule which result in high % editing at the target sequence (e.g., >85%, >90%, >95%, >98%, or >99%) in the target cell, e.g., described herein, even when the concentration of RNP delivered to the cell is reduced. Again, without being bound by theory, delivering a reduced or low concentration of RNP comprising a gRNA molecule that produces a high % editing at the target sequence in the target cell (including at the low RNP concentration), can be beneficial because it may reduce the frequency and number of off-target editing events. In one aspect, where a low or reduced concentration of RNP is to be used, the following procedure can be used to generate the RNP:
[0826] 1. Provide the Cas9 molecule and the tracr in solution at a high concentration (e.g., a concentration higher than the final RNP concentration to be delivered to the cell), and allow the two components to equilibrate;
[0827] 2. Provide the crRNA molecule, and allow the components to equilibrate (thereby forming a high-concentration solution of the RNP);
[0828] 3. Dilute the RNP solution to the desired concentration;
[0829] 4. Deliver said RNP at said desired concentration to the target cells, e.g., by electroporation.

[0830] The above procedure may be modified for use with sgRNA molecules by omitting step 2, above, and in step 1, providing the Cas9 molecule and the sgRNA molecule in solution at high concentration, and allowing the components to equilibrate. In embodiments, the Cas9 molecule and each gRNA component are provided in solution at a 1:2 ratio (Cas9:gRNA), e.g., a 1:2 molar ratio of Cas9:gRNA molecule. Where dgRNA molecules are used, the ratio, e.g., molar ratio, is 1:2:2 (Cas9:tracr:crRNA). In embodiments, the RNP is formed at a concentration of 20 uM or higher, e.g., a concentration from about 20 uM to about 50 uM. In embodiments, the RNP is formed at a concentration of 10 uM or higher, e.g., a concentration from about 10 uM to about 30 uM. In embodiments, the RNP is diluted to a final concentration of 10 uM or less (e.g., a concentration from about 0.01 uM to about 10 uM) in a solution comprising the target cell (e.g., described herein) for delivery to said target cell. In embodiments, the RNP is diluted to a final concentration of 3 uM or less (e.g., a concentration from about 0.01 uM to about 3 uM) in a solution comprising the target cell (e.g., described herein) for delivery to said target cell. In embodiments, the RNP is diluted to a final concentration of 1 uM or less (e.g., a concentration from about 0.01 uM to about 1 uM) in a solution comprising the target cell (e.g., described herein) for delivery to said target cell. In embodiments, the RNP is diluted to a final concentration of 0.3 uM or less (e.g., a concentration from about 0.01 uM to about 0.3 uM) in a solution comprising the target cell (e.g., described herein) for delivery to said target cell. In embodiments, the RNP is provided at a final concentration of about 3 uM in a solution comprising the target cell (e.g., described herein) for delivery to said target cell. In embodiments, the RNP is provided at a final concentration of about 1 uM in a solution comprising the target cell (e.g., described herein) for delivery to said target cell. In embodiments, the RNP is provided at a final concentration of about 0.3 uM in a solution comprising the target cell (e.g., described herein) for delivery to said target cell. In embodiments, the RNP is provided at a final concentration of about 0.1 uM in a solution comprising the target cell (e.g., described herein) for delivery to said target cell. In embodiments, the RNP is provided at a final concentration of about 0.05 uM in a solution comprising the target cell (e.g., described herein) for delivery to said target cell. In embodiments, the RNP is provided at a final concentration of about 0.03 uM in a solution comprising the target cell (e.g., described herein) for delivery to said target cell. In embodiments, the RNP is provided at a final concentration of about 0.01 uM in a solution comprising the target cell (e.g., described herein) for delivery to said target cell.

### XI. Methods of Treatment

[0831] The Cas systems, e.g., one or more gRNA molecules and one or more Cas molecules (e.g., Cas9 molecules), described herein are useful for the treatment of disease in a mammal, e.g., in a human. The terms “treat,” “treated,” “treating,” and “treatment,” include the administration of Cas systems, e.g., one or more gRNA molecules and one or more Cas9 molecules, to cells to prevent or delay the onset of the symptoms, complications, or biochemical indicia of a disease, alleviating the symptoms or arresting or inhibiting further development of the disease, condition, or disorder. Treatment may be prophylactic (to prevent or delay the onset of the disease, or to prevent the manifestation of clinical or subclinical symptoms thereof) or therapeutic suppression or alleviation of symptoms after the manifestation of the disease. Treatment can be measured by the therapeutic measures described herein. The methods of “treatment” of the present disclosure also include administration of cells altered by the introduction of a Cas system (e.g., one or more gRNA molecules and one or more Cas molecules) into said cells to a subject in order to cure, delay, reverse, reduce the severity of, or ameliorate one or more symptoms of a disease or condition, in order to prolong the health or survival of a subject beyond that expected in the absence of such treatment. For example, “treatment” includes the alleviation of a disease symptom in a subject by at least 5%, 6%, 7%, 8%, 9%, 10%, 11%, 12%, 13%, 14%, 15%, 16%, 17%, 18%, 19%, 20%, 25%, 30%, 35%, 40%, 45%, 50%, 55%, 60%, 65%, 70%, 75%, 80%, 85%, 90%, 95% or more.

### Methods of Treatment/Combination Therapies

[0832] In various embodiments, methods of administering cells to a subject are provided, e.g., T or NK cells, e.g., autologous or allogeneic T cells, e.g., described herein, (e.g., those that express a CAR and/or have been modified at a TET2 intron or a TET2 intron-exon as described herein). In some embodiments, the cell is generated using the CRISPR methods disclosed herein. Other methods for generating the cells may also be used.

[0833] In one embodiment, the method comprises administering a cell which comprises or which at any time comprised a gRNA molecule as described herein, to a subject. In embodiments, the cell has been altered by the introduction of the gRNA molecule such that the gene comprising sequence complementary to the gRNA molecule targeting domain is altered, such that expression of functional product of that gene is reduced or eliminated relative to an unmodified cell. In embodiments, the cell is further engineered to express a CAR, e.g., as described herein. In embodiments, the cell is an immune effector cell, e.g., an NK cell or T cell. In embodiments, the cell is allogeneic. In embodiments, the cell is autologous.

[0834] In another aspect, the present disclosure provides a method comprising administering a gRNA molecule, e.g., a gRNA molecule described herein, or a cell comprising or which at any time comprised a gRNA molecule, e.g., a gRNA molecule described herein, to a subject in need thereof. In one embodiment, the subject has a disorder described herein, e.g., the subject has cancer, e.g., the subject has a cancer which expresses a target antigen described herein. In one embodiment, the subject is a human.

[0835] In another aspect, the disclosure pertains to a method of treating a subject having a disease associated with expression of a cancer associated antigen as described herein comprising administering to the subject an effective amount of a gRNA molecule, e.g., a gRNA molecule described herein, or a cell comprising or which at any time comprised a gRNA molecule, e.g., a gRNA molecule described herein.

[0836] In yet another aspect, the disclosure features a method of treating a subject having a disease associated with expression of a tumor antigen (e.g., an antigen described herein), comprising administering to the subject an effective amount of a cell, e.g., an immune effector cell (e.g., a population of immune effector cells) comprising or which at any time comprised a gRNA molecule, e.g., a gRNA molecule described herein, further comprising a CAR molecule, wherein the CAR molecule comprises an antigen binding domain, a transmembrane domain, and an intracellular domain, said intracellular domain comprises a costimulatory domain and/or a primary signaling domain, wherein said antigen binding domain binds to the tumor antigen associated with the disease, e.g. a tumor antigen as described herein.

[0837] In a related aspect, the disclosure features a method of treating a subject having a disease associated with expression of a tumor antigen. The method comprises administering to the subject an effective amount of a gRNA molecule, e.g., a gRNA molecule described herein, or a cell comprising or which at any time comprised a gRNA molecule, e.g., a gRNA molecule described herein, in combination with an agent that increases the efficacy of the cell, wherein:
[0838] the agent that increases the efficacy of the immune cell is chosen from one or more of:
[0839] a protein phosphatase inhibitor;
[0840] a kinase inhibitor;
[0841] a cytokine;
[0842] an inhibitor of an immune inhibitory molecule; or
[0843] an agent that decreases the level or activity of a TREG cell.

[0844] In another aspect, the disclosure features a composition comprising an immune effector cell (e.g., a population of immune effector cells) comprising or which at any time comprised a gRNA molecule, e.g., a gRNA molecule described herein, for use in the treatment of a subject having a disease associated with expression of a tumor antigen, e.g., a disorder as described herein.

[0845] In certain embodiments of any of the aforesaid methods or uses, the cell comprising or which at any time comprised a gRNA described herein, has been altered such that the expression of the functional gene product of the gene comprising the target sequence complementary to the gRNA targeting domain has been reduced or abolished. In an embodiment, expression of the functional gene product of the gene comprising the target sequence complementary to the gRNA targeting domain has been abolished. In embodiments, the cell further expresses a CAR, e.g., as described herein. In embodiments the cell is allogeneic. In embodiments, the cell is autologous.

[0846] In certain embodiments of any of the aforesaid methods or uses, the disease associated with a tumor antigen, e.g., a tumor antigen described herein, is selected from a proliferative disease such as a cancer or malignancy or a precancerous condition such as a myelodysplasia, a myelodysplastic syndrome or a preleukemia, or is a non-cancer related indication associated with expression of a tumor antigen described herein. In one embodiment, the disease is a cancer described herein, e.g., a cancer described herein as being associated with a target described herein. In one embodiment, the disease is a hematologic cancer. In one embodiment, the hematologic cancer is leukemia. In one embodiment, the cancer is selected from the group consisting of one or more acute leukemias including but not limited to B-cell acute lymphoid leukemia (“BALL”), T-cell acute lymphoid leukemia (“TALL”), acute lymphoid leukemia (ALL), pediatric acute lymphoid leukemia; one or more chronic leukemias including but not limited to chronic myelogenous leukemia (CML), chronic lymphocytic leukemia (CLL); additional hematologic cancers or hematologic conditions including, but not limited to B cell prolymphocytic leukemia, blastic plasmacytoid dendritic cell neoplasm, Burkitt's lymphoma, diffuse large B cell lymphoma, follicular lymphoma, hairy cell leukemia, small cell- or a large cell-follicular lymphoma, malignant lymphoproliferative conditions, MALT lymphoma, mantle cell lymphoma, Marginal zone lymphoma, multiple myeloma, myelodysplasia and myelodysplastic syndrome, non-Hodgkin lymphoma, Hodgkin lymphoma, plasmablastic lymphoma, plasmacytoid dendritic cell neoplasm, Waldenstrom macroglobulinemia, and “preleukemia” which are a diverse collection of hematological conditions united by ineffective production (or dysplasia) of myeloid blood cells, and to disease associated with expression of a tumor antigen described herein include, but not limited to, atypical and/or non-classical cancers, malignancies, precancerous conditions or proliferative diseases expressing a tumor antigen as described herein; and any combination thereof. In one embodiment, the cancer is acute lymphoid leukemia (ALL). In one embodiment, the cancer is pediatric ALL. In one embodiment, the cancer is diffuse large B cell lymphoma. In one embodiment, the cancer is chronic lymphocytic leukemia. In one embodiment, the cancer is follicular lymphoma. In one embodiment, the cancer is Hodgkin lymphoma. In one embodiment, the cancer is non-Hodgkin lymphoma. In another embodiment, the disease associated with a tumor antigen described herein is a solid tumor.

[0847] In certain embodiments, the methods or uses are carried out in combination with an agent that increases the efficacy of the immune effector cell, e.g., an agent as described herein.

[0848] In any of the aforesaid methods or uses, the disease associated with expression of the tumor antigen is selected from the group consisting of a proliferative disease, a precancerous condition, a cancer, and a non-cancer related indication associated with expression of the tumor antigen.

[0849] The cancer can be a hematologic cancer, e.g., a cancer chosen from one or more of chronic lymphocytic leukemia (CLL), acute leukemias, acute lymphoid leukemia (ALL), B-cell acute lymphoid leukemia (B-ALL), T-cell acute lymphoid leukemia (T-ALL), chronic myelogenous leukemia (CML), B cell prolymphocytic leukemia, blastic plasmacytoid dendritic cell neoplasm, Burkitt's lymphoma, diffuse large B cell lymphoma, follicular lymphoma, hairy cell leukemia, small cell- or a large cell-follicular lymphoma, malignant lymphoproliferative conditions, MALT lymphoma, mantle cell lymphoma, marginal zone lymphoma, multiple myeloma, myelodysplasia and myelodysplastic syndrome, non-Hodgkin's lymphoma, Hodgkin's lymphoma, plasmablastic lymphoma, plasmacytoid dendritic cell neoplasm, Waldenstrom macroglobulinemia, or pre-leukemia.

[0850] The cancer can also be chosen from colon cancer, rectal cancer, renal-cell carcinoma, liver cancer, non-small cell carcinoma of the lung, cancer of the small intestine, cancer of the esophagus, melanoma, bone cancer, pancreatic cancer, skin cancer, cancer of the head or neck, cutaneous or intraocular malignant melanoma, uterine cancer, ovarian cancer, rectal cancer, cancer of the anal region, stomach cancer, testicular cancer, uterine cancer, carcinoma of the fallopian tubes, carcinoma of the endometrium, carcinoma of the cervix, carcinoma of the vagina, carcinoma of the vulva, Hodgkin's Disease, non-Hodgkin's lymphoma, cancer of the endocrine system, cancer of the thyroid gland, cancer of the parathyroid gland, cancer of the adrenal gland, sarcoma of soft tissue, cancer of the urethra, cancer of the penis, solid tumors of childhood, cancer of the bladder, cancer of the kidney or ureter, carcinoma of the renal pelvis, neoplasm of the central nervous system (CNS), primary CNS lymphoma, tumor angiogenesis, spinal axis tumor, brain stem glioma, pituitary adenoma, Kaposi's sarcoma, epidermoid cancer, squamous cell cancer, T-cell lymphoma, environmentally induced cancers, combinations of said cancers, and metastatic lesions of said cancers.

[0851] In certain embodiments of the methods or uses described herein, the cell is administered in combination with an agent that increases the efficacy of the immune effector cell, e.g., one or more of a protein phosphatase inhibitor, a kinase inhibitor, a cytokine, an inhibitor of an immune inhibitory molecule; or an agent that decreases the level or activity of a TREG cell.

[0852] In certain embodiments of the methods or uses described herein, the protein phosphatase inhibitor is a SHP-1 inhibitor and/or an SHP-2 inhibitor.

[0853] In other embodiments of the methods or uses described herein, kinase inhibitor is chosen from one or more of a CDK4 inhibitor, a CDK4/6 inhibitor (e.g., palbociclib), a BTK inhibitor (e.g., ibrutinib or RN-486), an mTOR inhibitor (e.g., rapamycin or everolimus (RAD001)), an MNK inhibitor, or a dual P13K/mTOR inhibitor. In one embodiment, the BTK inhibitor does not reduce or inhibit the kinase activity of interleukin-2-inducible kinase (ITK).

[0854] In other embodiments of the methods or uses described herein, the agent that decreases the level or activity of the TREG cells is chosen from cyclophosphamide, anti-GITR antibody, CD25-depletion, or a combination thereof.

[0855] In other embodiments, the agent that inhibits the inhibitory molecule comprises a first polypeptide comprising an inhibitory molecule or a fragment thereof and a second polypeptide that provides a positive signal to the cell, and wherein the first and second polypeptides are expressed on the CAR-containing immune cells, wherein (i) the first polypeptide comprises PD1, PD-L1, CTLA-4, TIM-3, LAG3, VISTA, BTLA, TIGIT, LAIR1, CD160, 2B4, TGF beta, CEACAM-1, CEACAM-3, and CEACAM-5 or a fragment thereof; and/or (ii) the second polypeptide comprises an intracellular signaling domain comprising a primary signaling domain and/or a costimulatory signaling domain. In one embodiment, the primary signaling domain comprises a functional domain of CD3 zeta; and/or the costimulatory signaling domain comprises a functional domain of a protein selected from 41BB, CD27 and CD28.

[0856] In other embodiments, cytokine is chosen from IL-7; IL-15; a composition comprising a interleukin-15 (IL-15) polypeptide, a interleukin-15 receptor alpha (IL-15Ra) polypeptide, or a combination of both a IL-15 polypeptide and a IL-15Ra polypeptide e.g., hetIL-15; IL-18; IL-21, or a combination thereof. Exemplary hetIL-15 are heterodimeric non-covalent complexes of IL-15 and IL-15Ra (Admune Therapeutics, LLC). Such hetIL-15 is described in, e.g., U.S. Pat. No. 8,124,084, U.S. 2012/0177598, U.S. 2009/0082299, U.S. 2012/0141413, and U.S. 2011/0081311, incorporated herein by reference. hetIL-15 is described in, e.g., U.S. Pat. No. 8,124,084, U.S. 2012/0177598, U.S. 2009/0082299, U.S. 2012/0141413, and U.S. 2011/0081311, incorporated herein by reference. Other exemplary embodiments of hetIL-15 are covalent complexes between an IL-15 polypeptide and an IL-15R (e.g., IL-15Ra) polypeptide.

[0857] In other embodiments, the cell and a second, e.g., any of the combination therapies disclosed herein (e.g., the agent that that increases the efficacy of the cell) are administered substantially simultaneously or sequentially.

[0858] In other embodiments, the cell is administered in combination with a molecule that targets GITR and/or modulates GITR function. In certain embodiments, the molecule targeting GITR and/or modulating GITR function is administered prior to the CAR-expressing cell or population of cells, or prior to apheresis.

[0859] In one embodiment, lymphocyte infusion, for example allogeneic lymphocyte infusion, is used in the treatment of the cancer, wherein the lymphocyte infusion comprises at least one cell, e.g., CAR-expressing cell, of the present disclosure. In one embodiment, autologous lymphocyte infusion is used in the treatment of the cancer, wherein the autologous lymphocyte infusion comprises at least one cell, e.g., CAR-expressing cell described herein.

[0860] In one embodiment, the cell is a T cell and the T cell is diaglycerol kinase (DGK) deficient. In one embodiment, the cell is a T cell and the T cell is Ikaros deficient. In one embodiment, the cell is a T cell and the T cell is both DGK and Ikaros deficient.

[0861] In one embodiment, the method includes administering a cell of the disclosure, as described herein, in combination with an agent which enhances the activity of the cell, wherein the agent is, e.g., a cytokine such as IL-7; IL-15; a composition comprising a interleukin-15 (IL-15) polypeptide, a interleukin-15 receptor alpha (IL-15Ra) polypeptide, or a combination of both a IL-15 polypeptide and a IL-15Ra polypeptide e.g., hetIL-15; IL-18; IL-21; or a combination thereof. The cytokine can be delivered in combination with, e.g., simultaneously or shortly after, administration of the cell. Alternatively, the cytokine can be delivered after a prolonged period of time after administration of the cell, e.g., after assessment of the subject's response to the cell. In one embodiment the cytokine is administered to the subject simultaneously (e.g., administered on the same day) with or shortly after administration (e.g., administered 1 day, 2 days, 3 days, 4 days, 5 days, 6 days, or 7 days after administration) of the cell or population of cells of any of claims 61-80. In other embodiments, the cytokine is administered to the subject after a prolonged period of time (e.g., e.g., at least 2 weeks, 3 weeks, 4 weeks, 6 weeks, 8 weeks, 10 weeks, or more) after administration of the cell or population of cells of any of claims 61-80, or after assessment of the subject's response to the cell.

[0862] In other embodiments, the cells of the disclosure that are further engineered to express a CAR are administered in combination with an agent that ameliorates one or more side effects associated with administration of a cell expressing a CAR molecule. Side effects associated with the CAR-expressing cell can be chosen from cytokine release syndrome (CRS) or hemophagocytic lymphohistiocytosis (HLH).

[0863] In embodiments of any of the aforesaid methods or uses, the cells expressing the CAR molecule are administered in combination with an agent that treats the disease associated with expression of the tumor antigen, e.g., any of the second or third therapies disclosed herein. Additional exemplary combinations include one or more of the following.

[0864] In another embodiment, the cell, e.g., as described herein, can be administered in combination with another agent, e.g., a kinase inhibitor and/or checkpoint inhibitor described herein. In an embodiment, a cell of the disclosure can further express another agent, e.g., an agent which enhances the activity of the cell.

[0865] For example, in one embodiment, the agent that enhances the activity of the cell can be an agent which inhibits an inhibitory molecule.

[0866] In one embodiment, the agent that inhibits the inhibitory molecule is an inhibitory nucleic acid is a dsRNA, a siRNA, or a shRNA.

[0867] In another embodiment, the agent which inhibits an inhibitory molecule, e.g., is a molecule described herein, e.g., an agent that comprises a first polypeptide, e.g., an inhibitory molecule, associated with a second polypeptide that provides a positive signal to the cell, e.g., an intracellular signaling domain described herein. In one embodiment, the agent comprises a first polypeptide, e.g., of an inhibitory molecule, or a fragment thereof (e.g., at least a portion of the extracellular domain of any of these), and a second polypeptide which is an intracellular signaling domain described herein (e.g., comprising a costimulatory domain (e.g., 41BB, CD27 or CD28, e.g., as described herein) and/or a primary signaling domain (e.g., a CD3 zeta signaling domain described herein). In one embodiment, the agent comprises a first polypeptide of PD1 or a fragment thereof (e.g., at least a portion of the extracellular domain of PD1), and a second polypeptide of an intracellular signaling domain described herein (e.g., a CD28 signaling domain described herein and/or a CD3 zeta signaling domain described herein).

[0868] In one embodiment, the cell of the present disclosure, e.g., T cell or NK cell, is administered to a subject that has received a previous stem cell transplantation, e.g., autologous stem cell transplantation.

[0869] In one embodiment, the cell of the present disclosure, e.g., T cell or NK cells, is administered to a subject that has received a previous dose of melphalan.

[0870] In one embodiment, the cell of the disclosure, is administered in combination with an agent that increases the efficacy of the cell, e.g., an agent described herein.

[0871] In one embodiment, the cells of the disclosure, are administered in combination with a low, immune enhancing dose of an mTOR inhibitor. While not wishing to be bound by theory, it is believed that treatment with a low, immune enhancing, dose (e.g., a dose that is insufficient to completely suppress the immune system but sufficient to improve immune function) is accompanied by a decrease in PD-1 positive T cells or an increase in PD-1 negative cells. PD-1 positive T cells, but not PD-1 negative T cells, can be exhausted by engagement with cells which express a PD-1 ligand, e.g., PD-L1 or PD-L2.

[0872] In an embodiment this approach can be used to optimize the performance of the cells described herein in the subject. While not wishing to be bound by theory, it is believed that, in an embodiment, the performance of endogenous, non-modified immune effector cells, e.g., T cells or NK cells, is improved. While not wishing to be bound by theory, it is believed that, in an embodiment, the performance of a CAR-expressing cell is improved. In other embodiments, cells, e.g., T cells or NK cells, which comprise or will be engineered to comprise a gRNA molecule of the disclosure, can be treated ex vivo by contact with an amount of an mTOR inhibitor that increases the number of PD1 negative immune effector cells, e.g., T cells or increases the ratio of PD1 negative immune effector cells, e.g., T cells/PD1 positive immune effector cells, e.g., T cells.

[0873] In an embodiment, administration of a low, immune enhancing, dose of an mTOR inhibitor, e.g., an allosteric inhibitor, e.g., RAD001, or a catalytic inhibitor, is initiated prior to administration of an CAR expressing cell described herein, e.g., T cells or NK cells. In an embodiment, the cells are administered after a sufficient time, or sufficient dosing, of an mTOR inhibitor, such that the level of PD1 negative immune effector cells, e.g., T cells or NK cells, or the ratio of PD1 negative immune effector cells, e.g., T cells/PD1 positive immune effector cells, e.g., T cells, has been, at least transiently, increased.

[0874] In an embodiment, the cell, e.g., T cell or NK cell, to be engineered to comprise a gRNA of the disclosure, is harvested after a sufficient time, or after sufficient dosing of the low, immune enhancing, dose of an mTOR inhibitor, such that the level of PD1 negative immune effector cells, e.g., T cells, or the ratio of PD1 negative immune effector cells, e.g., T cells/PD1 positive immune effector cells, e.g., T cells, in the subject or harvested from the subject has been, at least transiently, increased.

[0875] In one embodiment, the cell of the disclosure is administered in combination with an agent that ameliorates one or more side effect associated with administration of a cell, e.g., an agent described herein.

[0876] In one embodiment, the cell is administered in combination with an agent that treats the disease associated with a cancer associated antigen as described herein, e.g., an agent described herein.

[0877] In one embodiment, the cell is administered at a dose and/or dosing schedule described herein.

[0878] In one embodiment, the subject (e.g., human) receives an initial administration of cells of the disclosure, and one or more subsequent administrations of cells of the disclosure, wherein the one or more subsequent administrations are administered less than 15 days, e.g., 14, 13, 12, 11, 10, 9, 8, 7, 6, 5, 4, 3, or 2 days after the previous administration. In one embodiment, more than one administration of cells of the disclosure are administered to the subject (e.g., human) per week, e.g., 2, 3, or 4 administrations of cells comprising a CAR molecule are administered per week. In one embodiment, the subject (e.g., human subject) receives more than one administration of cells of the disclosure per week (e.g., 2, 3 or 4 administrations per week) (also referred to herein as a cycle), followed by a week of no administration of cells of the disclosure, and then one or more additional administration of cells of the disclosure (e.g., more than one administration of the cells of the disclosure per week) is administered to the subject. In another embodiment, the subject (e.g., human subject) receives more than one cycle of cells of the disclosure, and the time between each cycle is less than 10, 9, 8, 7, 6, 5, 4, or 3 days. In one embodiment, the cells of the disclosure are administered every other day for 3 administrations per week. In one embodiment, the cells of the disclosure are administered for at least two, three, four, five, six, seven, eight or more weeks.

[0879] In one embodiment, the cells of the disclosure are administered as a first line treatment for the disease, e.g., the cancer, e.g., the cancer described herein. In another embodiment, the cells of the disclosure, are administered as a second, third, fourth line treatment for the disease, e.g., the cancer, e.g., the cancer described herein.

[0880] In one embodiment, a population of cells described herein is administered.

[0881] In another aspect, the disclosure pertains to the isolated nucleic acid molecule encoding a gRNA of the disclosure, the gRNA molecule of the disclosure, and/or the cell comprising or which at any time comprised a gRNA of the disclosure for use as a medicament. In embodiments, the cell comprising or which at any time comprised a gRNA of the disclosure is or will be altered such that expression of the functional product of the gene comprising sequence complementary to the gRNA targeting domain is reduced or abolished.

[0882] In another aspect, the disclosure pertains to the isolated nucleic acid molecule encoding a gRNA of the disclosure, the gRNA molecule of the disclosure, and/or the cell comprising or which at any time comprised a gRNA of the disclosure for use in the treatment of a disease expressing a cancer associated antigen as described herein. In embodiments, the cell comprising or which at any time comprised a gRNA of the disclosure is or will be altered such that expression of the functional product of the gene comprising sequence complementary to the gRNA targeting domain is reduced or abolished.

[0883] In another aspect, the disclosure pertains to the isolated nucleic acid molecule encoding a gRNA of the disclosure, the gRNA molecule of the disclosure, and/or the cell comprising or which at any time comprised a gRNA of the disclosure for use as a medicament in combination with a cytokine, e.g., IL-7; IL-15; a composition comprising a interleukin-15 (IL-15) polypeptide, a interleukin-15 receptor alpha (IL-15Ra) polypeptide, or a combination of both a IL-15 polypeptide and a IL-15Ra polypeptide e.g., hetIL-15; IL-18; and/or IL-21; and/or combinations thereof as described herein. In another aspect, the disclosure pertains to a cytokine described herein for use as a medicament in combination with a cell described herein. In embodiments, the cell comprising or which at any time comprised a gRNA of the disclosure is or will be altered such that expression of the functional product of the gene comprising sequence complementary to the gRNA targeting domain is reduced or abolished. In another aspect, the disclosure pertains to the isolated nucleic acid molecule encoding a gRNA, the gRNA molecule, and/or the cell comprising or which at any time comprised a gRNA for use as a medicament in combination with a cytokine, e.g., IL-7; IL-15; a composition comprising a interleukin-15 (IL-15) polypeptide, a interleukin-15 receptor alpha (IL-15Ra) polypeptide, or a combination of both a IL-15 polypeptide and a IL-15Ra polypeptide e.g., hetIL-15; IL-18; and/or IL-21; and/or combinations thereof as described herein. In another aspect, the disclosure pertains to a cytokine described herein for use as a medicament in combination with a cell described herein. In embodiments, the cell comprising or which at any time comprised a gRNA is or will be altered such that expression of the functional product of the gene comprising sequence complementary to the gRNA targeting domain is reduced or abolished.

[0884] In another aspect, the disclosure pertains to the isolated nucleic acid molecule encoding a gRNA of the disclosure, the gRNA molecule of the disclosure, and/or the cell comprising or which at any time comprised a gRNA of the disclosure for use as a medicament in combination with a kinase inhibitor and/or a checkpoint inhibitor as described herein. In another aspect, the disclosure pertains to a kinase inhibitor and/or a checkpoint inhibitor described herein for use as a medicament in combination with a cell comprising or which at any time comprised a gRNA of the disclosure.

[0885] In another aspect, the disclosure features a composition comprising a cell of the disclosure for use in the treatment of a subject having a disease associated with expression of a tumor-supporting antigen, e.g., a disorder as described herein.

[0886] In any of the aforesaid methods or uses, the disease associated with expression of the tumor-supporting antigen is selected from the group consisting of a proliferative disease, a precancerous condition, a cancer, and a non-cancer related indication associated with expression of the tumor-supporting antigen. In an embodiment, the disease associated with a tumor-supporting antigen described herein is a solid tumor.

[0887] In one embodiment of the methods or uses described herein, the cell of the disclosure is administered in combination with another agent. In one embodiment, the agent can be a kinase inhibitor, e.g., a CDK4/6 inhibitor, a BTK inhibitor, an mTOR inhibitor, a MNK inhibitor, or a dual PI3K/mTOR inhibitor, and combinations thereof. In one embodiment, the kinase inhibitor is a CDK4 inhibitor, e.g., a CDK4 inhibitor described herein, e.g., a CD4/6 inhibitor, such as, e.g., 6-Acetyl-8-cyclopentyl-5-methyl-2-(5-piperazin-1-yl-pyridin-2-ylamino)-8H-pyrido[2,3-d]pyrimidin-7-one, hydrochloride (also referred to as palbociclib or PD0332991). In one embodiment, the kinase inhibitor is a BTK inhibitor, e.g., a BTK inhibitor described herein, such as, e.g., ibrutinib. In one embodiment, the kinase inhibitor is an mTOR inhibitor, e.g., an mTOR inhibitor described herein, such as, e.g., rapamycin, a rapamycin analog, OSI-027. The mTOR inhibitor can be, e.g., an mTORC1 inhibitor and/or an mTORC2 inhibitor, e.g., an mTORC1 inhibitor and/or mTORC2 inhibitor described herein. In one embodiment, the kinase inhibitor is a MNK inhibitor, e.g., a MNK inhibitor described herein, such as, e.g., 4-amino-5-(4-fluoroanilino)-pyrazolo[3,4-d] pyrimidine. The MNK inhibitor can be, e.g., a MNK1a, MNK1b, MNK2a and/or MNK2b inhibitor. The dual PI3K/mTOR inhibitor can be, e.g., PF-04695102.

[0888] In one embodiment of the methods or uses described herein, the kinase inhibitor is a CDK 4 inhibitor selected from aloisine A; flavopiridol or HMR-1275, 2-(2-chlorophenyl)-5,7-dihydroxy-8-[(3S,4R)-3-hydroxy-1-methyl-4-piperidinyl]-4-chromenone; crizotinib (PF-02341066; 2-(2-Chlorophenyl)-5,7-dihydroxy-8-[(2R,3S)-2-(hydroxymethyl)-1-methyl-3-pyrrolidinyl]-4H-1-benzopyran-4-one, hydrochloride (P276-00); 1-methyl-5-[[2-[5-(trifluoromethyl)-1H-imidazol-2-yl]-4-pyridinyl]oxy]-N-[4-(trifluoromethyl)phenyl]-1H-benzimidazol-2-amine (RAF265); indisulam (E7070); roscovitine (CYC202); palbociclib (PD0332991); dinaciclib (SCH727965); N-[5-[[(5-tert-butyloxazol-2-yl)methyl] thio] thiazol-2-yl]piperidine-4-carboxamide (BMS 387032); 4-[[9-chloro-7-(2,6-difluorophenyl)-5H-pyrimido[5,4-d][2]benzazepin-2-yl]amino]-benzoic acid (MLN8054); 5-[3-(4,6-difluoro-1H-benzimidazol-2-yl)-1H-indazol-5-yl]-N-ethyl-4-methyl-3-pyridinemethanamine (AG-024322); 4-(2,6-dichlorobenzoylamino)-1H-pyrazole-3-carboxylic acid N-(piperidin-4-yl)amide (AT7519); 4-[2-methyl-1-(1-methylethyl)-1H-imidazol-5-yl]-N-[4-(methylsulfonyl)phenyl]-2-pyrimidinamine (AZD5438); and XL281 (BMS908662).

[0889] In one embodiment of the methods or uses described herein, the kinase inhibitor is a CDK4 inhibitor, e.g., palbociclib (PD0332991), and the palbociclib is administered at a dose of about 50 mg, 60 mg, 70 mg, 75 mg, 80 mg, 90 mg, 100 mg, 105 mg, 110 mg, 115 mg, 120 mg, 125 mg, 130 mg, 135 mg (e.g., 75 mg, 100 mg or 125 mg) daily for a period of time, e.g., daily for 14-21 days of a 28 day cycle, or daily for 7-12 days of a 21 day cycle. In one embodiment, 1, 2, 3, 4, 5, 6, 7, 8, 9, 10, 11, 12 or more cycles of palbociclib are administered.

[0890] In one embodiment of the methods or uses described herein, the kinase inhibitor is a BTK inhibitor selected from ibrutinib (PCI-32765); GDC-0834; RN-486; CGI-560; CGI-1764; HM-71224; CC-292; ONO-4059; CNX-774; and LFM-A13. In one embodiment, the BTK inhibitor does not reduce or inhibit the kinase activity of interleukin-2-inducible kinase (ITK), and is selected from GDC-0834; RN-486; CGI-560; CGI-1764; HM-71224; CC-292; ONO-4059; CNX-774; and LFM-A13.

[0891] In one embodiment of the methods or uses described herein, the kinase inhibitor is a BTK inhibitor, e.g., ibrutinib (PCI-32765), and the ibrutinib is administered at a dose of about 250 mg, 300 mg, 350 mg, 400 mg, 420 mg, 440 mg, 460 mg, 480 mg, 500 mg, 520 mg, 540 mg, 560 mg, 580 mg, 600 mg (e.g., 250 mg, 420 mg or 560 mg) daily for a period of time, e.g., daily for 21 day cycle, or daily for 28 day cycle. In one embodiment, 1, 2, 3, 4, 5, 6, 7, 8, 9, 10, 11, 12 or more cycles of ibrutinib are administered.

[0892] In one embodiment of the methods or uses described herein, the kinase inhibitor is a BTK inhibitor that does not inhibit the kinase activity of ITK, e.g., RN-486, and RN-486 is administered at a dose of about 100 mg, 110 mg, 120 mg, 130 mg, 140 mg, 150 mg, 160 mg, 170 mg, 180 mg, 190 mg, 200 mg, 210 mg, 220 mg, 230 mg, 240 mg, 250 mg (e.g., 150 mg, 200 mg or 250 mg) daily for a period of time, e.g., daily a 28 day cycle. In one embodiment, 1, 2, 3, 4, 5, 6, 7, or more cycles of RN-486 are administered.

[0893] In one embodiment of the methods or uses described herein, the kinase inhibitor is an mTOR inhibitor selected from temsirolimus; ridaforolimus (1R,2R,4S)-4-[(2R)-2 [(1R,9S,12S,15R,16E,18R,19R,21R,23S,24E,26E,28Z,30S,32S,35R)-1,18-dihydroxy-19,30-dimethoxy-15,17,21,23, 29,35-hexamethyl-2,3,10,14,20-pentaoxo-11,36-dioxa-4-azatricyclo[30.3.1.0^{4,9}] hexatriaconta-16,24,26,28-tetraen-12-yl] propyl]-2-methoxycyclohexyl dimethylphosphinate, also known as AP23573 and MK8669; everolimus (RAD001); rapamycin (AY22989); simapimod; (5-{2,4-bis [(3S)-3-methylmorpholin-4-yl]pyrido[2,3-d]pyrimidin-7-yl}-2-methoxyphenyl) methanol (AZD8055); 2-amino-8-[trans-4-(2-hydroxyethoxy)cyclohexyl]-6-(6-methoxy-3-pyridinyl)-4-methyl-pyrido[2,3-d]pyrimidin-7 (8H)-one (PF04691502); and 2-[1,4-dioxo-4-[[4-(4-oxo-8-phenyl-4H-1-benzopyran-2-yl) morpholinium-4-yl]methoxy]butyl]-L-arginylglycyl-L-α-aspartyl-L-serine (SEQ ID NO: 10556) inner salt (SF1126); and XL765.

[0894] In one embodiment of the methods or uses described herein, the kinase inhibitor is an mTOR inhibitor, e.g., rapamycin, and the rapamycin is administered at a dose of about 3 mg, 4 mg, 5 mg, 6 mg, 7 mg, 8 mg, 9 mg, 10 mg (e.g., 6 mg) daily for a period of time, e.g., daily for 21 day cycle, or daily for 28 day cycle. In one embodiment, 1, 2, 3, 4, 5, 6, 7, 8, 9, 10, 11, 12 or more cycles of rapamycin are administered. In one embodiment, the kinase inhibitor is an mTOR inhibitor, e.g., everolimus and the everolimus is administered at a dose of about 2 mg, 2.5 mg, 3 mg, 4 mg, 5 mg, 6 mg, 7 mg, 8 mg, 9 mg, 10 mg, 11 mg, 12 mg, 13 mg, 14 mg, 15 mg (e.g., 10 mg) daily for a period of time, e.g., daily for 28 day cycle. In one embodiment, 1, 2, 3, 4, 5, 6, 7, 8, 9, 10, 11, 12 or more cycles of everolimus are administered.

[0895] In one embodiment of the methods or uses described herein, the kinase inhibitor is an MNK inhibitor selected from CGP052088; 4-amino-3-(p-fluorophenylamino)-pyrazolo [3,4-d]pyrimidine (CGP57380); cercosporamide; ETC-1780445-2; and 4-amino-5-(4-fluoroanilino)-pyrazolo[3,4-d]pyrimidine.

[0896] In one embodiment of the methods or uses described herein, the kinase inhibitor is a dual phosphatidylinositol 3-kinase (PI3K) and mTOR inhibitor selected from 2-Amino-8-[trans-4-(2-hydroxyethoxy)cyclohexyl]-6-(6-methoxy-3-pyridinyl)-4-methyl-pyrido[2,3-d]pyrimidin-7 (8H)-one (PF-04691502); N-[4-[[4-(Dimethylamino)-1-piperidinyl]carbonyl]phenyl]-N-[4-(4,6-di-4-morpholinyl-1,3,5-triazin-2-yl)phenyl]urea (PF-05212384, PKI-587); 2-Methyl-2-{4-[3-methyl-2-oxo-8-(quinolin-3-yl)-2,3-dihydro-1H-imidazo[4,5-c]quinolin-1-yl]phenyl}propanenitrile (BEZ-235); apitolisib (GDC-0980, RG7422); 2,4-Difluoro-N-{2-(methyloxy)-5-[4-(4-pyridazinyl)-6-quinolinyl]-3-pyridinyl}benzenesulfonamide (GSK2126458); 8-(6-methoxypyridin-3-yl)-3-methyl-1-(4-(piperazin-1-yl)-3-(trifluoromethyl)phenyl)-1H-imidazo[4,5-c]quinolin-2 (3H)-one Maleic acid (NVP-BGT226); 3-[4-(4-Morpholinylpyrido[3′, 2′: 4,5]furo[3,2-d]pyrimidin-2-yl]phenol (PI-103); 5-(9-isopropyl-8-methyl-2-morpholino-9H-purin-6-yl)pyrimidin-2-amine (VS-5584, SB2343); and N-[2-[(3,5-Dimethoxyphenyl)amino]quinoxalin-3-yl]-4-[(4-methyl-3-methoxyphenyl) carbonyl]aminophenylsulfonamide (XL765).

[0897] In one embodiment of the methods or uses described herein, a CAR expressing immune effector cell described herein is administered to a subject in combination with a protein tyrosine phosphatase inhibitor, e.g., a protein tyrosine phosphatase inhibitor described herein. In one embodiment, the protein tyrosine phosphatase inhibitor is an SHP-1 inhibitor, e.g., an SHP-1 inhibitor described herein, such as, e.g., sodium stibogluconate. In one embodiment, the protein tyrosine phosphatase inhibitor is an SHP-2 inhibitor.

[0898] In one embodiment of the methods or uses described herein, the cell of the disclosure is administered in combination with another agent, and the agent is a cytokine. The cytokine can be, e.g., IL-7; IL-15; a composition comprising a interleukin-15 (IL-15) polypeptide, a interleukin-15 receptor alpha (IL-15Ra) polypeptide, or a combination of both a IL-15 polypeptide and a IL-15Ra polypeptide e.g., hetIL-15; IL-18; IL-21; or a combination thereof. In another embodiment, the cell of the disclosure is administered in combination with a checkpoint inhibitor, e.g., a checkpoint inhibitor described herein. For example, in one embodiment, the check point inhibitor inhibits an inhibitory molecule selected from PD-1, PD-L1, CTLA-4, TIM-3, CEACAM (e.g., CEACAM-1, CEACAM-3 and/or CEACAM-5), LAG-3, VISTA, BTLA, TIGIT, LAIR1, CD160, 2B4 and TGF beta.

[0899] In one aspect, the disclosure provides a method of treating a subject, e.g., a subject having a condition described herein, with a cell, e.g., described herein, e.g., a cell which has heterologous nucleic acid sequence, e.g., encoding a CAR (e.g., described herein), stably integrated into the genome at a site at or near the target sequence of a gRNA molecule described herein, e.g., a gRNA molecule comprising a targeting domain listed in Table 1 or Table 2.

[0900] In any of the embodiments and aspects of the disclosure, including in any of the aforementioned aspects and embodiments, the population of cells may be enriched, for example, during manufacturing, for a particular subset or subpopulation, e.g., for T-cells, e.g., for stem-cell memory-like T cells.

[0901] In another aspect, a method of treating a subject, e.g., reducing or ameliorating, a hyperproliferative condition or disorder (e.g., a cancer), e.g., solid tumor, a soft tissue tumor, or a metastatic lesion, in a subject is provided. As used herein, the term “cancer” is meant to include all types of cancerous growths or oncogenic processes, metastatic tissues or malignantly transformed cells, tissues, or organs, irrespective of histopathologic type or stage of invasiveness. Examples of solid tumors include malignancies, e.g., sarcomas, adenocarcinomas, and carcinomas, of the various organ systems, such as those affecting liver, lung, breast, lymphoid, gastrointestinal (e.g., colon), genitourinary tract (e.g., renal, urothelial cells), prostate and pharynx. Adenocarcinomas include malignancies such as most colon cancers, rectal cancer, renal-cell carcinoma, liver cancer, non-small cell carcinoma of the lung, cancer of the small intestine and cancer of the esophagus. In one embodiment, the cancer is a melanoma, e.g., an advanced stage melanoma. Metastatic lesions of the aforementioned cancers can also be treated or prevented using the methods and compositions of the disclosure. Examples of other cancers that can be treated include bone cancer, pancreatic cancer, skin cancer, cancer of the head or neck, cutaneous or intraocular malignant melanoma, uterine cancer, ovarian cancer, rectal cancer, cancer of the anal region, stomach cancer, testicular cancer, uterine cancer, carcinoma of the fallopian tubes, carcinoma of the endometrium, carcinoma of the cervix, carcinoma of the vagina, carcinoma of the vulva, Hodgkin Disease, non-Hodgkin lymphoma, cancer of the esophagus, cancer of the small intestine, cancer of the endocrine system, cancer of the thyroid gland, cancer of the parathyroid gland, cancer of the adrenal gland, sarcoma of soft tissue, cancer of the urethra, cancer of the penis, chronic or acute leukemias including acute myeloid leukemia, chronic myeloid leukemia, acute lymphoblastic leukemia, chronic lymphocytic leukemia, solid tumors of childhood, lymphocytic lymphoma, cancer of the bladder, cancer of the kidney or ureter, carcinoma of the renal pelvis, neoplasm of the central nervous system (CNS), primary CNS lymphoma, tumor angiogenesis, spinal axis tumor, brain stem glioma, pituitary adenoma, Kaposi's sarcoma, epidermoid cancer, squamous cell cancer, T-cell lymphoma, environmentally induced cancers including those induced by asbestos, and combinations of said cancers. Treatment of metastatic cancers, e.g., metastatic cancers that express PD-L1 (Iwai et al. (2005) Int. Immunol. 17:133-144) can be effected using the antibody molecules described herein.

[0902] Exemplary cancers whose growth can be inhibited include cancers typically responsive to immunotherapy. Non-limiting examples of cancers for treatment include melanoma (e.g., metastatic malignant melanoma), renal cancer (e.g. clear cell carcinoma), prostate cancer (e.g. hormone refractory prostate adenocarcinoma), breast cancer, colon cancer and lung cancer (e.g. non-small cell lung cancer). Additionally, refractory or recurrent malignancies can be treated using the molecules described herein.

[0903] In one aspect, the disclosure pertains to a method of treating cancer in a subject. In one aspect, the cancer associated with expression of a cancer associate antigen as described herein is a hematological cancer. In one aspect, the hematological cancer is a leukemia or a lymphoma. In one aspect, a cancer associated with expression of a cancer associate antigen as described herein includes cancers and malignancies including, but not limited to, e.g., one or more acute leukemias including but not limited to, e.g., B-cell acute Lymphoid Leukemia (“BALL”), T-cell acute Lymphoid Leukemia (“TALL”), acute lymphoid leukemia (ALL); one or more chronic leukemias including but not limited to, e.g., chronic myelogenous leukemia (CML), Chronic Lymphoid Leukemia (CLL). Additional cancers or hematologic conditions associated with expression of a cancer associate antigen as described herein include, but are not limited to, e.g., B cell prolymphocytic leukemia, blastic plasmacytoid dendritic cell neoplasm, Burkitt's lymphoma, diffuse large B cell lymphoma, Follicular lymphoma, Hairy cell leukemia, small cell- or a large cell-follicular lymphoma, malignant lymphoproliferative conditions, MALT lymphoma, mantle cell lymphoma, Marginal zone lymphoma, multiple myeloma, myelodysplasia and myelodysplastic syndrome, non-Hodgkin lymphoma, plasmablastic lymphoma, plasmacytoid dendritic cell neoplasm, Waldenstrom macroglobulinemia, and “preleukemia” which are a diverse collection of hematological conditions united by ineffective production (or dysplasia) of myeloid blood cells, and the like. Further a disease associated with a cancer associate antigen as described herein expression include, but not limited to, e.g., atypical and/or non-classical cancers, malignancies, precancerous conditions or proliferative diseases associated with expression of a cancer associate antigen as described herein.

[0904] In some embodiments, a cancer that can be treated is multiple myeloma. Generally, myeloma cells are thought to be negative for a cancer associate antigen as described herein expression by flow cytometry. Thus, in some embodiments, a cell further engineered to express a CAR as described herein, e.g., a CD19 CAR or BCMA CAR as described herein, may be used to target myeloma cells. In some embodiments, cars of the present disclosure therapy can be used in combination with one or more additional therapies, e.g., lenalidomide treatment.

[0905] In various aspects, the immune effector cells (e.g., T cells, NK cells) administered to the patient, or their progeny, persist in the patient for at least four months, five months, six months, seven months, eight months, nine months, ten months, eleven months, twelve months, thirteen months, fourteen month, fifteen months, sixteen months, seventeen months, eighteen months, nineteen months, twenty months, twenty-one months, twenty-two months, twenty-three months, two years, three years, four years, or five years after administration of the T cell or NK cell to the patient.

[0906] The disclosure also includes a type of cellular therapy where immune effector cells (e.g., T cells, NK cells) are further modified, e.g., by in vitro transcribed RNA, to transiently express a chimeric antigen receptor (CAR) and the CAR T cell or NK cell is infused to a recipient in need thereof. The infused cell is able to kill tumor cells in the recipient. Thus, in various aspects, the immune effector cells (e.g., T cells, NK cells) administered to the patient, is present for less than one month, e.g., three weeks, two weeks, one week, after administration of the T cell or NK cell to the patient.

[0907] Without wishing to be bound by any particular theory, the anti-tumor immunity response elicited by the CAR-modified immune effector cells (e.g., T cells, NK cells) may be an active or a passive immune response, or alternatively may be due to a direct vs indirect immune response. In one aspect, the CAR transduced immune effector cells (e.g., T cells, NK cells) exhibit specific proinflammatory cytokine secretion and potent cytolytic activity in response to human cancer cells expressing the a cancer associate antigen as described herein, resist soluble a cancer associate antigen as described herein inhibition, mediate bystander killing and mediate regression of an established human tumor. For example, antigen-less tumor cells within a heterogeneous field of a cancer-associated antigen as described herein-expressing tumor may be susceptible to indirect destruction (e.g., destruction of a precursor cell) by a cancer-associated antigen as described herein-redirected immune effector cells (e.g., T cells, NK cells) that has previously reacted against adjacent antigen-positive cancer cells.

[0908] Ex vivo procedures are well known in the art and are discussed more fully below. Briefly, cells are isolated from a mammal (e.g., a human) and genetically modified (i.e., transduced or transfected in vitro) with a gRNA molecule of the disclosure, and optionally, a vector expressing a CAR disclosed herein. The modified cell can be administered to a mammalian recipient to provide a therapeutic benefit. The mammalian recipient may be a human and the cell can be autologous with respect to the recipient. Alternatively, the cells can be allogeneic with respect to the recipient.

[0909] The procedure for ex vivo expansion of hematopoietic stem and progenitor cells is described in U.S. Pat. No. 5,199,942, incorporated herein by reference, can be applied to the cells of the present disclosure. Other suitable methods are known in the art, therefore the present disclosure is not limited to any particular method of ex vivo expansion of the cells. Briefly, ex vivo culture and expansion of immune effector cells (e.g., T cells, NK cells) comprises: (1) collecting CD34+ hematopoietic stem and progenitor cells from a mammal from peripheral blood harvest or bone marrow explants; and (2) expanding such cells ex vivo. In addition to the cellular growth factors described in U.S. Pat. No. 5,199,942, other factors such as flt3-L, IL-1, IL-3 and c-kit ligand, can be used for culturing and expansion of the cells.

[0910] Procedures for ex vivo expansion of immune effector cells, e.g., T cells, are described, for example, in WO2015/142675, the contents of which are hereby incorporated by reference in their entirety. Such procedures may be useful when used in conjunction with the methods described herein.

[0911] In addition to using a cell-based vaccine in terms of ex vivo immunization, the present disclosure also provides compositions and methods for in vivo immunization to elicit an immune response directed against an antigen in a patient.

[0912] Generally, the cells activated and expanded as described herein may be utilized in the treatment and prevention of diseases that arise in individuals who are immunocompromised. In particular, the CAR-modified immune effector cells (e.g., T cells, NK cells) of the disclosure are used in the treatment of diseases, disorders and conditions associated with expression of a cancer associate antigen as described herein. In certain aspects, the cells of the disclosure are used in the treatment of patients at risk for developing diseases, disorders and conditions associated with expression of a cancer associate antigen as described herein. Thus, the present disclosure provides methods for the treatment or prevention of diseases, disorders and conditions associated with expression of a cancer associate antigen as described herein comprising administering to a subject in need thereof, a therapeutically effective amount of the CAR-modified immune effector cells (e.g., T cells, NK cells) of the disclosure.

[0913] In one aspect the cells of the disclosure, including the cells further engineered to express a CAR, may be used to treat a proliferative disease such as a cancer or malignancy or is a precancerous condition such as a myelodysplasia, a myelodysplastic syndrome or a preleukemia. Further a disease associated with a cancer associate antigen as described herein expression include, but not limited to, e.g., atypical and/or non-classical cancers, malignancies, precancerous conditions or proliferative diseases expressing a cancer associated antigen as described herein. Non-cancer related indications associated with expression of a cancer associate antigen as described herein include, but are not limited to, e.g., autoimmune disease, (e.g., lupus), inflammatory disorders (allergy and asthma) and transplantation.

[0914] The cells (e.g., T cells, NK cells) of the present disclosure may be administered either alone, or as a pharmaceutical composition in combination with diluents and/or with other components such as IL-2 or other cytokines or cell populations.

### Hematologic Cancer

[0915] Hematological cancer conditions are the types of cancer such as leukemia, lymphoma, and malignant lymphoproliferative conditions that affect blood, bone marrow and the lymphatic system.

[0916] Leukemia can be classified as acute leukemia and chronic leukemia. Acute leukemia can be further classified as acute myelogenous leukemia (AML) and acute lymphoid leukemia (ALL). Chronic leukemia includes chronic myelogenous leukemia (CML) and chronic lymphoid leukemia (CLL). Other related conditions include myelodysplastic syndromes (MDS, formerly known as “preleukemia”) which are a diverse collection of hematological conditions united by ineffective production (or dysplasia) of myeloid blood cells and risk of transformation to AML.

[0917] Lymphoma is a group of blood cell tumors that develop from lymphocytes. Exemplary lymphomas include non-Hodgkin lymphoma and Hodgkin lymphoma.

[0918] The present disclosure also provides methods for inhibiting the proliferation or reducing a cancer associated antigen as described herein-expressing cell population, the methods comprising contacting a population of cells comprising a cancer associated antigen as described herein-expressing cell with a cell of the disclosure (e.g., an NK cell or T cell) further engineered to express a CAR that binds to the a cancer associated antigen as described herein-expressing cell. In a specific aspect, the present disclosure provides methods for inhibiting the proliferation or reducing the population of cancer cells expressing a cancer associated antigen as described herein, the methods comprising contacting a cancer associate antigen as described herein-expressing cancer cell population with a T cell or NK cell of the disclosure further engineered to express a CAR that binds to a cancer associated antigen as described herein-expressing cell. In one aspect, the present disclosure provides methods for inhibiting the proliferation or reducing the population of cancer cells expressing a cancer associated antigen as described herein, the methods comprising contacting a cancer associated antigen as described herein-expressing cancer cell population with a T cell or NK cell of the disclosure further engineered to express a CAR that binds to a cancer associated antigen as described herein-expressing cell. In certain aspects, T cell or NK cell of the disclosure reduces the quantity, number, amount or percentage of cells and/or cancer cells by at least 25%, at least 30%, at least 40%, at least 50%, at least 65%, at least 75%, at least 85%, at least 95%, or at least 99% in a subject with or animal model for myeloid leukemia or another cancer associated with a cancer associated antigen as described herein-expressing cells relative to a negative control. In one aspect, the subject is a human.

[0919] The present disclosure also provides methods for preventing, treating and/or managing a disease associated with a cancer associated antigen as described herein-expressing cells (e.g., a hematologic cancer or atypical cancer expressing a cancer associated antigen as described herein), the methods comprising administering to a subject in need a T cell or NK cell of the disclosure, including those further engineered to express a CAR that binds to a cancer associated antigen as described herein-expressing cell. In one aspect, the subject is a human. Non-limiting examples of disorders associated with a cancer associated antigen as described herein-expressing cells include autoimmune disorders (such as lupus), inflammatory disorders (such as allergies and asthma) and cancers (such as hematological cancers or atypical cancers expressing a cancer associated antigen as described herein).

[0920] The present disclosure also provides methods for preventing, treating and/or managing a disease associated with a cancer associated antigen as described herein-expressing cells, the methods comprising administering to a subject in need a T cell or NK cell of the disclosure, including those further engineered to express a CAR that binds to a cancer associated antigen as described herein-expressing cell. In one aspect, the subject is a human.

[0921] The present disclosure provides methods for preventing relapse of cancer associated with a cancer associated antigen as described herein-expressing cells, the methods comprising administering to a subject in need thereof a T cell or NK cell of the disclosure, including those further engineered to express a CAR that binds to a cancer associated antigen as described herein-expressing cell. In one aspect, the methods comprise administering cell in combination with an effective amount of another therapy.

### Pharmaceutical Compositions and Treatments

[0922] Pharmaceutical compositions disclosed herein may comprise a cell, e.g., a plurality of cells, as described herein, in combination with one or more pharmaceutically or physiologically acceptable carriers, diluents or excipients. Such compositions may comprise buffers such as neutral buffered saline, phosphate buffered saline and the like; carbohydrates such as glucose, mannose, sucrose or dextran, mannitol; proteins; polypeptides or amino acids such as glycine; antioxidants; chelating agents such as EDTA or glutathione; adjuvants (e.g., aluminium hydroxide); and preservatives. Compositions of the present disclosure are in one aspect formulated for intravenous administration.

[0923] Pharmaceutical compositions disclosed herein may comprise a nucleic acid, e.g., a gRNA or a vector as disclosed herein, in combination with one or more pharmaceutically or physiologically acceptable carriers, diluents or excipients.

[0924] Pharmaceutical compositions of the present disclosure may be administered in a manner appropriate to the disease to be treated (or prevented). The quantity and frequency of administration will be determined by such factors as the condition of the patient, and the type and severity of the patient's disease, although appropriate dosages may be determined by clinical trials.

[0925] In one embodiment, the pharmaceutical composition is substantially free of, e.g., there are no detectable levels of a contaminant, e.g., selected from the group consisting of endotoxin, mycoplasma, replication competent lentivirus (RCL), p24, VSV-G nucleic acid, HIV gag, residual anti-CD3/anti-CD28 coated beads, mouse antibodies, pooled human serum, bovine serum albumin, bovine serum, culture media components, vector packaging cell or plasmid components, a bacterium and a fungus. In one embodiment, the bacterium is at least one selected from the group consisting of Alcaligenes faecalis, Candida albicans, Escherichia coli, Haemophilus influenza, Neisseria meningitides, Pseudomonas aeruginosa, Staphylococcus aureus, Streptococcus pneumonia, and Streptococcus pyogenes group A.

[0926] When “an immunologically effective amount,” “an anti-tumor effective amount,” “a tumor-inhibiting effective amount,” or “therapeutic amount” is indicated, the precise amount of the compositions of the present disclosure to be administered can be determined by a physician with consideration of individual differences in age, weight, tumor size, extent of infection or metastasis, and condition of the patient (subject). It can generally be stated that a pharmaceutical composition comprising the immune effector cells (e.g., T cells, NK cells) described herein may be administered at a dosage of 10⁴ to 10⁹ cells/kg body weight, in some instances 10⁵ to 10⁶ cells/kg body weight, including all integer values within those ranges. T cell compositions may also be administered multiple times at these dosages. The cells can be administered by using infusion techniques that are commonly known in immunotherapy (see, e.g., Rosenberg et al., New Eng. J. of Med. 319:1676, 1988).

[0927] In certain aspects, it may be desired to administer activated immune effector cells (e.g., T cells, NK cells) to a subject and then subsequently redraw blood (or have an apheresis performed), activate immune effector cells (e.g., T cells, NK cells) therefrom according to the present disclosure, and reinfuse the patient with these activated and expanded immune effector cells (e.g., T cells, NK cells). This process can be carried out multiple times every few weeks. In certain aspects, immune effector cells (e.g., T cells, NK cells) can be activated from blood draws of from 10 cc to 400 cc. In certain aspects, immune effector cells (e.g., T cells, NK cells) are activated from blood draws of 20 cc, 30 cc, 40 cc, 50 cc, 60 cc, 70 cc, 80 cc, 90 cc, or 100 cc.

[0928] The administration of the subject compositions may be carried out in any convenient manner, including by aerosol inhalation, injection, ingestion, transfusion, implantation or transplantation. The compositions described herein may be administered to a patient trans arterially, subcutaneously, intradermally, intratumorally, intranodally, intramedullary, intramuscularly, by intravenous (i.v.) injection, or intraperitoneally. In one aspect, the T cell compositions of the present disclosure are administered to a patient by intradermal or subcutaneous injection. In one aspect, the T cell compositions of the present disclosure are administered by i.v. injection. The compositions of immune effector cells (e.g., T cells, NK cells) may be injected directly into a tumor, lymph node, or site of infection.

[0929] In a particular exemplary aspect, subjects may undergo leukapheresis, wherein leukocytes are collected, enriched, or depleted ex vivo to select and/or isolate the cells of interest, e.g., T cells. These T cell isolates may be expanded by methods known in the art and treated as described herein thereby creating a T cell of the disclosure. Subjects in need thereof may subsequently undergo standard treatment with high dose chemotherapy followed by peripheral blood stem cell transplantation. In certain aspects, following or concurrent with the transplant, subjects receive an infusion of the expanded T cells of the present disclosure. In an additional aspect, expanded cells are administered before or following surgery.

[0930] The dosage of the above treatments to be administered to a patient will vary with the precise nature of the condition being treated and the recipient of the treatment. The scaling of dosages for human administration can be performed according to art-accepted practices. The dose for CAMPATH, for example, will generally be in the range 1 to about 100 mg for an adult patient, usually administered daily for a period between 1 and 30 days. The preferred daily dose is 1 to 10 mg per day although in some instances larger doses of up to 40 mg per day may be used (described in U.S. Pat. No. 6,120,766).

[0931] In one aspect, CAR-expressing cells of the present disclosures are generated using lentiviral viral vectors, such as lentivirus. Cells, e.g., CARTs, generated that way will have stable CAR expression.

[0932] In one aspect, CAR-expressing cells, e.g., CARTs, are generated using a viral vector such as a gammaretroviral vector, e.g., a gammaretroviral vector described herein. CARTs generated using these vectors can have stable CAR expression.

[0933] In one aspect, CARTs transiently express CAR vectors for 4, 5, 6, 7, 8, 9, 10, 11, 12, 13, 14, 15 days after transduction. Transient expression of CARs can be effected by RNA CAR vector delivery. In one aspect, the CAR RNA is transduced into the T cell by electroporation.

[0934] A potential issue that can arise in patients being treated using transiently expressing CAR immune effector cells (e.g., T cells, NK cells) (particularly with murine scFv bearing CARTs) is anaphylaxis after multiple treatments.

[0935] Without being bound by this theory, it is believed that such an anaphylactic response might be caused by a patient developing humoral anti-CAR response, i.e., anti-CAR antibodies having an anti-IgE isotype. It is thought that a patient's antibody producing cells undergo a class switch from IgG isotype (that does not cause anaphylaxis) to IgE isotype when there is a ten to fourteen day break in exposure to antigen.

[0936] If a patient is at high risk of generating an anti-CAR antibody response during the course of transient CAR therapy (such as those generated by RNA transductions), CART infusion breaks should not last more than ten to fourteen days.

### Methods of Making Modified CAR-Expressing Cells

[0937] In an embodiment, the disclosure pertains to a method of making a cell (e.g., an immune effector cell or population thereof) comprising introducing into (e.g., transducing) a cell a gRNA molecule to a TET2 intron (e.g., to a sequence within a sequence of Table 3), e.g., a gRNA molecule comprising a targeting domain listed in Table 1 or Table 2 and introducing into said cell template nucleic acid comprising sequence encoding a CAR (e.g., as described herein). In embodiments, the sequence encoding the CAR is integrated into the genome at or near the target sequence of the gRNA molecule. In embodiments, the heterologous nucleic acid sequence integrated or near said site does not comprise an element of a lentiviral vector (e.g., does not comprise a cPPT or CPT element).

[0938] In another aspect, the disclosure pertains to a method of making a cell (e.g., an immune effector cell or population thereof) comprising introducing into (e.g., transducing) a cell, e.g., a T cell or a NK cell described herein, with a vector of comprising a nucleic acid encoding a CAR, e.g., a CAR described herein; or a nucleic acid encoding a CAR molecule e.g., a CAR described herein.

[0939] The cell in the methods is an immune effector cell (e.g., a T cell or a NK cell, or a combination thereof). In some embodiments, the cell in the methods is diaglycerol kinase (DGK) and/or Ikaros deficient.

[0940] In some embodiments, the introducing the nucleic acid molecule encoding a CAR comprises transducing a vector comprising the nucleic acid molecule encoding a CAR, or transfecting the nucleic acid molecule encoding a CAR, wherein the nucleic acid molecule is an in vitro transcribed RNA.

[0941] In some embodiments, the method further comprises:

[0942] providing a population of immune effector cells (e.g., T cells or NK cells); and

[0943] removing T regulatory cells from the population, thereby providing a population of T regulatory-depleted cells;

[0944] wherein steps a) and b) are performed prior to introducing the nucleic acid encoding the CAR and/or CRISPR system to the population.

[0945] In embodiments of the methods, the T regulatory cells comprise CD25+ T cells, and are removed from the cell population using an anti-CD25 antibody, or fragment thereof. The anti-CD25 antibody, or fragment thereof, can be conjugated to a substrate, e.g., a bead.

[0946] In other embodiments, the population of T regulatory-depleted cells provided from step (b) contains less than 30%, 25%, 20%, 15%, 10%, 5%, 4%, 3%, 2%, 1% of CD25+ cells.

[0947] In yet other embodiments, the method further comprises removing cells from the population which express a tumor antigen that does not comprise CD25 to provide a population of T regulatory-depleted and tumor antigen depleted cells prior to introducing the nucleic acid encoding a CAR to the population. The tumor antigen can be selected from CD19, CD30, CD38, CD123, CD20, CD14 or CD11b, or a combination thereof.

[0948] In other embodiments, the method further comprises removing cells from the population which express a checkpoint inhibitor, to provide a population of T regulatory-depleted and inhibitory molecule depleted cells prior to introducing the nucleic acid encoding a CAR or CRISPR system to the population. The checkpoint inhibitor can be chosen from PD-1, LAG-3, TIM3, B7-H1, CD160, P1H, 2B4, CEACAM (e.g., CEACAM-1, CEACAM-3, and/or CEACAM-5), TIGIT, CTLA-4, BTLA, and LAIR1.

[0949] Further embodiments disclosed herein encompass providing a population of immune effector cells. The population of immune effector cells provided can be selected based upon the expression of one or more of CD3, CD28, CD4, CD8, CD45RA, and/or CD45RO. In certain embodiments, the population of immune effector cells provided are CD3+ and/or CD28+.

[0950] In certain embodiments of the method, the method further comprises expanding the population of cells after the nucleic acid molecule encoding a CAR has been introduced.

[0951] In embodiments, the population of cells is expanded for a period of 8 days or less.

[0952] In certain embodiments, the population of cells is expanded in culture for 5 days, and the resulting cells are more potent than the same cells expanded in culture for 9 days under the same culture conditions.

[0953] In other embodiments, the population of cells is expanded in culture for 5 days show at least a one, two, three or four fold increase in cell doublings upon antigen stimulation as compared to the same cells expanded in culture for 9 days under the same culture conditions.

[0954] In yet other embodiments, the population of cells is expanded in culture for 5 days, and the resulting cells exhibit higher proinflammatory IFN-γ and/or GM-CSF levels, as compared to the same cells expanded in culture for 9 days under the same culture conditions.

[0955] In other embodiments, the population of cells is expanded by culturing the cells in the presence of an agent that stimulates a CD3/TCR complex associated signal and/or a ligand that stimulates a costimulatory molecule on the surface of the cells. The agent can be a bead conjugated with anti-CD3 antibody, or a fragment thereof, and/or anti-CD28 antibody, or a fragment thereof.

[0956] In other embodiments, the population of cells is expanded in an appropriate media that includes one or more interleukin that result in at least a 200-fold, 250-fold, 300-fold, or 350-fold increase in cells over a 14 day expansion period, as measured by flow cytometry.

[0957] In other embodiments, the population of cells is expanded in the presence IL-15 and/or IL-7.

[0958] In certain embodiments, the method further includes cryopreserving the population of the cells after the appropriate expansion period.

[0959] In yet other embodiments, the method of making disclosed herein further comprises contacting the population of immune effector cells with a nucleic acid encoding a telomerase subunit, e.g., hTERT. The nucleic acid encoding the telomerase subunit can be DNA.

[0960] The present disclosure also provides a method of generating a population of RNA-engineered cells, e.g., cells described herein, e.g., immune effector cells (e.g., T cells, NK cells), transiently expressing exogenous RNA. The method comprises introducing an in vitro transcribed RNA or synthetic RNA into a cell, where the RNA comprises a nucleic acid encoding a CAR molecule described herein.

[0961] In another aspect, the disclosure pertains to a method of providing an anti-tumor immunity in a subject comprising administering to the subject an effective amount of a cell comprising a CAR molecule, e.g., a cell expressing a CAR molecule described herein. In one embodiment, the cell is an autologous T cell or NK cell. In one embodiment, the cell is an allogeneic T cell or NK cell. In one embodiment, the subject is a human.

[0962] In one aspect, the disclosure includes a population of autologous cells that are transfected or transduced with a vector comprising a nucleic acid molecule encoding a CAR molecule, e.g., as described herein. In one embodiment, the vector is a retroviral vector. In one embodiment, the vector is a self-inactivating lentiviral vector as described elsewhere herein. In one embodiment, the vector is delivered (e.g., by transfecting or electroporating) to a cell, e.g., a T cell or a NK cell, wherein the vector comprises a nucleic acid molecule encoding a CAR of the present disclosure as described herein, which is transcribed as an mRNA molecule, and the CARs of the present disclosure is translated from the RNA molecule and expressed on the surface of the cell.

[0963] In another aspect, the present disclosure provides a population of CAR-expressing cells, e.g., CAR-expressing immune effector cells (e.g., T cells or NK cells). In some embodiments, the population of CAR-expressing cells comprises a mixture of cells expressing different CARs. For example, in one embodiment, the population of CAR-expressing immune effector cells (e.g., T cells or NK cells) can include a first cell expressing a CAR having an antigen binding domain that binds to a first tumor antigen as described herein, and a second cell expressing a CAR having a different antigen binding domain that binds to a second tumor antigen as described herein. As another example, the population of CAR-expressing cells can include a first cell expressing a CAR that includes an antigen binding domain that binds to a tumor antigen as described herein, and a second cell expressing a CAR that includes an antigen binding domain to a target other than a tumor antigen as described herein. In one embodiment, the population of CAR-expressing cells includes, e.g., a first cell expressing a CAR that includes a primary intracellular signaling domain, and a second cell expressing a CAR that includes a secondary signaling domain, e.g., a costimulatory signaling domain.

[0964] In another aspect, the present disclosure provides a population of cells wherein at least one cell in the population expresses a CAR having an antigen binding domain that binds to a tumor antigen as described herein, and a second cell expressing another agent, e.g., an agent which enhances the activity of a CAR-expressing cell. For example, in one embodiment, the agent can be an agent which inhibits an inhibitory molecule. Examples of inhibitory molecules include PD-1, PD-L1, CTLA-4, TIM-3, CEACAM (e.g., CEACAM-1, CEACAM-3 and/or CEACAM-5), LAG-3, VISTA, BTLA, TIGIT, LAIR1, CD160, 2B4 and TGF beta. In one embodiment, the agent which inhibits an inhibitory molecule, e.g., is a molecule described herein, e.g., an agent that comprises a first polypeptide, e.g., an inhibitory molecule, associated with a second polypeptide that provides a positive signal to the cell, e.g., an intracellular signaling domain described herein. In one embodiment, the agent comprises a first polypeptide, e.g., of an inhibitory molecule such as PD-1, LAG-3, CTLA-4, CD160, BTLA, LAIR1, TIM-3, CEACAM (e.g., CEACAM-1, CEACAM-3 and/or CEACAM-5), 2B4 and TIGIT, or a fragment of any of these, and a second polypeptide which is an intracellular signaling domain described herein (e.g., comprising a costimulatory domain (e.g., 41BB, CD27 or CD28, e.g., as described herein) and/or a primary signaling domain (e.g., a CD3 zeta signaling domain described herein). In one embodiment, the agent comprises a first polypeptide of PD-1 or a fragment thereof, and a second polypeptide of an intracellular signaling domain described herein (e.g., a CD28, CD27, OX40 or 4-IBB signaling domain described herein and/or a CD3 zeta signaling domain described herein).

[0965] In one embodiment, the nucleic acid molecule encoding a CAR of the present disclosure molecule, e.g., as described herein, is expressed as an mRNA molecule. In one embodiment, the genetically modified CAR of the present disclosure-expressing cells, e.g., immune effector cells (e.g., T cells, NK cells), can be generated by transfecting or electroporating an RNA molecule encoding the desired CARs (e.g., without a vector sequence) into the cell. In one embodiment, a CAR of the present disclosure molecule is translated from the RNA molecule once it is incorporated and expressed on the surface of the recombinant cell.

[0966] A method for generating mRNA for use in transfection involves in vitro transcription (IVT) of a template with specially designed primers, followed by polyA addition, to produce a construct containing 3′ and 5′ untranslated sequence (“UTR”) (e.g., a 3′ and/or 5′ UTR described herein), a 5′ cap (e.g., a 5′ cap described herein) and/or Internal Ribosome Entry Site (IRES) (e.g., an IRES described herein), the nucleic acid to be expressed, and a polyA tail, typically 50-2000 bases in length (SEQ ID NO: 10555). RNA so produced can efficiently transfect different kinds of cells. In one embodiment, the template includes sequences for the CAR. In an embodiment, an RNA CAR vector is transduced into a cell, e.g., a T cell or a NK cell, by electroporation.

### XII. Methods of Manufacture

[0967] The disclosure provides methods of manufacturing cells, e.g., T cells, e.g., allogeneic T cells, e.g., CAR-engineered cells modified, or to be modified, with the gRNA molecules described herein.

### Introduction of CRISPR Systems

[0968] The disclosure comprises cells, e.g., immune effector cells, e.g., allogeneic or autologous cells, which comprise, or at one time comprised, one or more gRNA molecules as described herein. The CRISPR systems described herein may be introduced into the cells by any of the methods described herein. The cells may further be engineered to express a CAR as described herein.

[0969] In one aspect, the disclosure provides a method for making a cell comprising:
[0970] a) introducing a gRNA molecule, or nucleic acid encoding said gRNA molecule, e.g., as described herein (e.g., comprising a targeting domain comprising a sequence complementary to a target sequence within a region specified in Table 3 or e.g., comprising a targeting domain listed in Table 1 or Table 2) into said cell;
[0971] b) introducing a Cas9 molecule as described herein, or nucleic acid encoding said Cas9 molecule, into said cell;
[0972] c) introducing nucleic acid encoding a CAR into said cell (e.g., a template nucleic acid comprising sequence encoding a CAR); and
[0973] d) expanding and activating the cells.

[0974] In embodiments, steps a), b) and c) occur together (e.g., are performed in one step, e.g., the gRNA molecule and the Cas9 protein are introduced as a ribonuclear protein (RNP) complex and the template nucleic acid are introduced together, e.g., by electroporation). In embodiments, the introduction of a) and b) (e.g., by electroporation of an RNP) occur before steps c) (e.g., via a transfection) and d). In embodiments, the introduction of c) (e.g., via transfection) occurs before the introduction of a) and b) (e.g., by electroporation of an RNP). In embodiments, the introduction of c) and the expanding and activating of d) occurs before the introduction of a) and b). In embodiments, the method further comprises e) selecting the cells which are CAR-expressing. In embodiments, the method further comprises f) selecting the cells which have reduced or eliminated function or expression of the gene targeted by the gRNA molecule of step a). For example, if the gRNA molecule comprises a targeting domain complementary to a target sequence in a TET2 intron or intron-exon junction (e.g., comprises a targeting domain comprising, e.g., consisting of, a sequence listed in Table 1 or Table 2, insertion of the nucleic acid sequence encoding the CAR may occur at or near the target sequence of the gRNA molecule of step a), and the cell may have reduced function, e.g., catalytic function, of TET2.

### Expansion and Activation of Cells

[0975] Immune effector cells such as T cells may be activated and expanded generally using methods as described, for example, in U.S. Pat. Nos. 6,352,694; 6,534,055; 6,905,680; 6,692,964; 5,858,358; 6,887,466; 6,905,681; 7,144,575; 7,067,318; 7,172,869; 7,232,566; 7,175,843; 5,883,223; 6,905,874; 6,797,514; 6,867,041; and U.S. Patent Application Publication No. 20060121005, each of which is incorporated by reference in its entirety.

[0976] Generally, a population of immune effector cells e.g., T regulatory cell depleted cells, may be expanded by contact with a surface having attached thereto an agent that stimulates a CD3/TCR complex associated signal and a ligand that stimulates a costimulatory molecule on the surface of the T cells. In particular, T cell populations may be stimulated as described herein, such as by contact with an anti-CD3 antibody, or antigen-binding fragment thereof, or an anti-CD2 antibody immobilized on a surface, or by contact with a protein kinase C activator (e.g., bryostatin) in conjunction with a calcium ionophore. For co-stimulation of an accessory molecule on the surface of the T cells, a ligand that binds the accessory molecule is used. For example, a population of T cells can be contacted with an anti-CD3 antibody and an anti-CD28 antibody, under conditions appropriate for stimulating proliferation of the T cells. To stimulate proliferation of either CD4+ T cells or CD8+ T cells, an anti-CD3 antibody and an anti-CD28 antibody can be used. Examples of an anti-CD28 antibody include 9.3, B-T3, XR-CD28 (Diaclone, Besançon, France) can be used as can other methods commonly known in the art (Berg et al., Transplant Proc. 30 (8): 3975-3977, 1998; Haanen et al., J. Exp. Med. 190 (9): 13191328, 1999; Garland et al., J. Immunol Meth. 227 (1-2): 53-63, 1999).

[0977] In embodiments in which the cells have reduced or absent levels of expression or levels of a component of the TCR, activation may be achieved through means other than interaction with CD3. In cells which further express a CAR, activation may be achieved by contacting said cells with the antigen bound by the antigen-binding domain of the CAR, or a fragment thereof capable of binding the CAR. Such antigen or fragment thereof may be present on, for example, an antibody scaffold, a cell (e.g., an antigen presenting cell, e.g., a cell which naturally expresses said antigen or one which has been artificially engineered to express said antigen on its cell surface), or a solid support such as a bead or membrane.

[0978] In certain aspects, the primary stimulatory signal and the costimulatory signal for the T cell may be provided by different protocols. For example, the agents providing each signal may be in solution or coupled to a surface. When coupled to a surface, the agents may be coupled to the same surface (i.e., in “cis” formation) or to separate surfaces (i.e., in “trans” formation). Alternatively, one agent may be coupled to a surface and the other agent in solution. In one aspect, the agent providing the costimulatory signal is bound to a cell surface and the agent providing the primary activation signal is in solution or coupled to a surface. In certain aspects, both agents can be in solution. In one aspect, the agents may be in soluble form, and then cross-linked to a surface, such as a cell expressing Fc receptors or an antibody or other binding agent which will bind to the agents. In this regard, see for example, U.S. Patent Application Publication Nos. 20040101519 and 20060034810 for artificial antigen presenting cells (aAPCs) that are contemplated for use in activating and expanding T cells in the present disclosure.

[0979] In one aspect, the two agents are immobilized on beads, either on the same bead, i.e., “cis,” or to separate beads, i.e., “trans.” By way of example, the agent providing the primary activation signal is an anti-CD3 antibody or an antigen-binding fragment thereof and the agent providing the costimulatory signal is an anti-CD28 antibody or antigen-binding fragment thereof; and both agents are co-immobilized to the same bead in equivalent molecular amounts. In one aspect, a 1:1 ratio of each antibody bound to the beads for CD4+ T cell expansion and T cell growth is used. In certain aspects of the present disclosure, a ratio of anti CD3:CD28 antibodies bound to the beads is used such that an increase in T cell expansion is observed as compared to the expansion observed using a ratio of 1:1. In one particular aspect an increase of from about 1 to about 3 fold is observed as compared to the expansion observed using a ratio of 1:1. In one aspect, the ratio of CD3:CD28 antibody bound to the beads ranges from 100:1 to 1:100 and all integer values there between. In one aspect, more anti-CD28 antibody is bound to the particles than anti-CD3 antibody, i.e., the ratio of CD3:CD28 is less than one. In certain aspects, the ratio of anti CD28 antibody to anti CD3 antibody bound to the beads is greater than 2:1. In one particular aspect, a 1:100 CD3:CD28 ratio of antibody bound to beads is used. In one aspect, a 1:75 CD3:CD28 ratio of antibody bound to beads is used. In a further aspect, a 1:50 CD3:CD28 ratio of antibody bound to beads is used. In one aspect, a 1:30 CD3:CD28 ratio of antibody bound to beads is used. In one preferred aspect, a 1:10 CD3:CD28 ratio of antibody bound to beads is used. In one aspect, a 1:3 CD3:CD28 ratio of antibody bound to the beads is used. In yet one aspect, a 3:1 CD3:CD28 ratio of antibody bound to the beads is used.

[0980] Ratios of particles to cells from 1:500 to 500:1 and any integer values in between may be used to stimulate T cells or other target cells. As those of ordinary skill in the art can readily appreciate, the ratio of particles to cells may depend on particle size relative to the target cell. For example, small sized beads could only bind a few cells, while larger beads could bind many. In certain aspects the ratio of cells to particles ranges from 1:100 to 100:1 and any integer values in-between and in further aspects the ratio comprises 1:9 to 9:1 and any integer values in between, can also be used to stimulate T cells. The ratio of anti-CD3- and anti-CD28-coupled particles to T cells that result in T cell stimulation can vary as noted above, however certain preferred values include 1:100, 1:50, 1:40, 1:30, 1:20, 1:10, 1:9, 1:8, 1:7, 1:6, 1:5, 1:4, 1:3, 1:2, 1:1, 2:1, 3:1, 4:1, 5:1, 6:1, 7:1, 8:1, 9:1, 10:1, and 15:1 with one preferred ratio being at least 1:1 particles per T cell. In one aspect, a ratio of particles to cells of 1:1 or less is used. In one particular aspect, a preferred particle:cell ratio is 1:5. In further aspects, the ratio of particles to cells can be varied depending on the day of stimulation. For example, in one aspect, the ratio of particles to cells is from 1:1 to 10:1 on the first day and additional particles are added to the cells every day or every other day thereafter for up to 10 days, at final ratios of from 1:1 to 1:10 (based on cell counts on the day of addition). In one particular aspect, the ratio of particles to cells is 1:1 on the first day of stimulation and adjusted to 1:5 on the third and fifth days of stimulation. In one aspect, particles are added on a daily or every other day basis to a final ratio of 1:1 on the first day, and 1:5 on the third and fifth days of stimulation. In one aspect, the ratio of particles to cells is 2:1 on the first day of stimulation and adjusted to 1:10 on the third and fifth days of stimulation. In one aspect, particles are added on a daily or every other day basis to a final ratio of 1:1 on the first day, and 1:10 on the third and fifth days of stimulation. One of skill in the art will appreciate that a variety of other ratios may be suitable for use in the present disclosure. In particular, ratios will vary depending on particle size and on cell size and type. In one aspect, the most typical ratios for use are in the neighborhood of 1:1, 2:1 and 3:1 on the first day.

[0981] In further aspects, the cells, such as T cells, are combined with agent-coated beads, the beads and the cells are subsequently separated, and then the cells are cultured. In an alternative aspect, prior to culture, the agent-coated beads and cells are not separated but are cultured together. In a further aspect, the beads and cells are first concentrated by application of a force, such as a magnetic force, resulting in increased ligation of cell surface markers, thereby inducing cell stimulation.

[0982] By way of example, cell surface proteins may be ligated by allowing paramagnetic beads to which anti-CD3 and anti-CD28 are attached (3×28 beads) to contact the T cells. In one aspect the cells (for example, 10⁴ to 10⁹ T cells) and beads (for example, DYNABEADS® M-450 CD3/CD28 T paramagnetic beads at a ratio of 1:1) are combined in a buffer, for example PBS (without divalent cations such as, calcium and magnesium). Again, those of ordinary skill in the art can readily appreciate any cell concentration may be used. For example, the target cell may be very rare in the sample and comprise only 0.01% of the sample or the entire sample (i.e., 100%) may comprise the target cell of interest. Accordingly, any cell number is within the context of the present disclosure. In certain aspects, it may be desirable to significantly decrease the volume in which particles and cells are mixed together (i.e., increase the concentration of cells), to ensure maximum contact of cells and particles. For example, in one aspect, a concentration of about 10 billion cells/ml, 9 billion/ml, 8 billion/ml, 7 billion/ml, 6 billion/ml, 5 billion/ml, or 2 billion cells/ml is used. In one aspect, greater than 100 million cells/ml is used. In a further aspect, a concentration of cells of 10, 15, 20, 25, 30, 35, 40, 45, or 50 million cells/ml is used. In yet one aspect, a concentration of cells from 75, 80, 85, 90, 95, or 100 million cells/ml is used. In further aspects, concentrations of 125 or 150 million cells/ml can be used. Using high concentrations can result in increased cell yield, cell activation, and cell expansion. Further, use of high cell concentrations allows more efficient capture of cells that may weakly express target antigens of interest, such as CD28-negative T cells. Such populations of cells may have therapeutic value and would be desirable to obtain in certain aspects. For example, using high concentration of cells allows more efficient selection of CD8+ T cells that normally have weaker CD28 expression.

[0983] In one embodiment, cells of the disclosure, e.g., cells comprising or which at any time comprised or will comprise a gRNA molecule as described herein, e.g., said cells transduced with a nucleic acid encoding a CAR, e.g., a CAR described herein, are expanded, e.g., by a method described herein. In one embodiment, the cells are expanded in culture for a period of several hours (e.g., about 2, 3, 4, 5, 6, 7, 8, 9, 10, 15, 18, 21 hours) to about 14 days (e.g., 1, 2, 3, 4, 5, 6, 7, 8, 9, 10, 11, 12, 13 or 14 days). In one embodiment, the cells are expanded for a period of 4 to 9 days. In one embodiment, the cells are expanded for a period of 8 days or less, e.g., 7, 6 or 5 days. In one embodiment, the cells are expanded in culture for 5 days, and the resulting cells are more potent than the same cells expanded in culture for 9 days under the same culture conditions. Potency can be defined, e.g., by various T cell functions, e.g. proliferation, target cell killing, cytokine production, activation, migration, or combinations thereof. In one embodiment, the cells are expanded for 5 days show at least a one, two, three or four fold increase in cells doublings upon antigen stimulation as compared to the same cells expanded in culture for 9 days under the same culture conditions. In one embodiment, the cells are expanded in culture for 5 days, and the resulting cells exhibit higher proinflammatory cytokine production, e.g., IFN-γ and/or GM-CSF levels, as compared to the same cells expanded in culture for 9 days under the same culture conditions. In one embodiment, the cells expanded for 5 days show at least a one, two, three, four, five, ten fold or more increase in pg/ml of proinflammatory cytokine production, e.g., IFN-γ and/or GM-CSF levels, as compared to the same cells expanded in culture for 9 days under the same culture conditions.

[0984] Several cycles of stimulation may also be desired such that culture time of T cells can be 60 days or more. Conditions appropriate for T cell culture include an appropriate media (e.g., Minimal Essential Media or RPMI Media 1640 or, X-vivo 15, (Lonza)) that may contain factors necessary for proliferation and viability, including serum (e.g., fetal bovine or human serum), interleukin-2 (IL-2), insulin, IFN-γ, IL-4, IL-7, GM-CSF, IL-10, IL-12, IL-15, TGFβ, and TNF-α or any other additives for the growth of cells known to the skilled artisan. Other additives for the growth of cells include, but are not limited to, surfactant, plasmanate, and reducing agents such as N-acetyl-cysteine and 2-mercaptoethanol. Media can include RPMI 1640, AIM-V, DMEM, MEM, α-MEM, F-12, X-Vivo 15, and X-Vivo 20, Optimizer, with added amino acids, sodium pyruvate, and vitamins, either serum-free or supplemented with an appropriate amount of serum (or plasma) or a defined set of hormones, and/or an amount of cytokine(s) sufficient for the growth and expansion of T cells. Antibiotics, e.g., penicillin and streptomycin, are included only in experimental cultures, not in cultures of cells that are to be infused into a subject. The target cells are maintained under conditions necessary to support growth, for example, an appropriate temperature (e.g., 37° C.) and atmosphere (e.g., air plus 5% CO₂).

[0985] In one embodiment, the cells are expanded in an appropriate media (e.g., media described herein) that includes one or more interleukin that result in at least a 200-fold (e.g., 200-fold, 250-fold, 300-fold, 350-fold) increase in cells over a 14 day expansion period, e.g., as measured by a method described herein such as flow cytometry. In one embodiment, the cells are expanded in the presence of IL-15 and/or IL-7 (e.g., IL-15 and IL-7).

[0986] In embodiments, methods described herein, manufacturing methods for cells of the disclosure, e.g., cells comprising or which at any time comprised or will comprise a gRNA molecule as described herein, e.g., said cells expressing a CAR, comprise removing T regulatory cells, e.g., CD25+ T cells, from a cell population, e.g., using an anti-CD25 antibody, or fragment thereof, or a CD25-binding ligand, IL-2. Methods of removing T regulatory cells, e.g., CD25+ T cells, from a cell population are described herein. In embodiments, the methods, e.g., manufacturing methods, further comprise contacting a cell population (e.g., a cell population in which T regulatory cells, such as CD25+ T cells, have been depleted; or a cell population that has previously contacted an anti-CD25 antibody, fragment thereof, or CD25-binding ligand) with IL-15 and/or IL-7. For example, the cell population (e.g., that has previously contacted an anti-CD25 antibody, fragment thereof, or CD25-binding ligand) is expanded in the presence of IL-15 and/or IL-7.

[0987] In some embodiments the cells of the disclosure, e.g., cells comprising or which at any time comprised or will comprise a gRNA molecule as described herein, e.g., said cells expressing a CAR as described herein, are contacted with a composition comprising a interleukin-15 (IL-15) polypeptide, a interleukin-15 receptor alpha (IL-15Ra) polypeptide, or a combination of both a IL-15 polypeptide and a IL-15Ra polypeptide e.g., hetIL-15, during the manufacturing of the CAR-expressing cell, e.g., ex vivo. In embodiments, a cell described herein is contacted with a composition comprising an IL-15 polypeptide during the manufacturing of the cell, e.g., ex vivo. In embodiments, a cell described herein is contacted with a composition comprising a combination of both a IL-15 polypeptide and a IL-15 Ra polypeptide during the manufacturing of the CAR-expressing cell, e.g., ex vivo. In embodiments, a cell described herein is contacted with a composition comprising hetIL-15 during the manufacturing of the CAR-expressing cell, e.g., ex vivo.

[0988] In one embodiment the cells of the disclosure, e.g., cells comprising or which at any time comprised or will comprise a gRNA molecule as described herein, e.g., said cells expressing a CAR as described herein, is contacted with a composition comprising hetIL-15 during ex vivo expansion. In an embodiment, the cell described herein is contacted with a composition comprising an IL-15 polypeptide during ex vivo expansion. In an embodiment, the CAR-expressing cell described herein is contacted with a composition comprising both an IL-15 polypeptide and an IL-15Ra polypeptide during ex vivo expansion. In one embodiment the contacting results in the survival and proliferation of a lymphocyte subpopulation, e.g., CD8+ T cells.

[0989] T cells that have been exposed to varied stimulation times may exhibit different characteristics. For example, typical blood or apheresed peripheral blood mononuclear cell products have a helper T cell population (TH, CD4+) that is greater than the cytotoxic or suppressor T cell population (TC, CD8+). Ex vivo expansion of T cells by stimulating CD3 and CD28 receptors produces a population of T cells that prior to about days 8-9 consists predominately of TH cells, while after about days 8-9, the population of T cells comprises an increasingly greater population of TC cells. Accordingly, depending on the purpose of treatment, infusing a subject with a T cell population comprising predominately of TH cells may be advantageous. Similarly, if an antigen-specific subset of TC cells has been isolated it may be beneficial to expand this subset to a greater degree.

[0990] Further, in addition to CD4 and CD8 markers, other phenotypic markers vary significantly, but in large part, reproducibly during the course of the cell expansion process. Thus, such reproducibility enables the ability to tailor an activated T cell product for specific purposes.

[0991] Once a cell of the disclosure has been engineered to express a CAR described herein is constructed, various assays can be used to evaluate the activity of the molecule, such as but not limited to, the ability to expand T cells following antigen stimulation, sustain T cell expansion in the absence of re-stimulation, and anti-cancer activities in appropriate in vitro and animal models. Assays to evaluate the effects of a CAR and/or cell expressing CAR are described in further detail below

[0992] Western blot analysis of CAR expression in primary T cells can be used to detect the presence of monomers and dimers. See, e.g., Milone et al., Molecular Therapy 17 (8): 1453-1464 (2009). Very briefly, T cells (1:1 mixture of CD4⁺ and CD8⁺ T cells) expressing the CARs are expanded in vitro for more than 10 days followed by lysis and SDS-PAGE under reducing conditions. CARs containing the full length TCR-ζ cytoplasmic domain and the endogenous TCR-ζ chain are detected by western blotting using an antibody to the TCR-ζ chain. The same T cell subsets are used for SDS-PAGE analysis under non-reducing conditions to permit evaluation of covalent dimer formation.

[0993] In vitro expansion of CAR⁺ T cells following antigen stimulation can be measured by flow cytometry. For example, a mixture of CD4⁺ and CD8⁺ T cells are stimulated with αCD3/αCD28 aAPCs followed by transduction with lentiviral vectors expressing GFP under the control of the promoters to be analyzed. Exemplary promoters include the CMV IE gene, EF-1α, ubiquitin C, or phosphoglycerokinase (PGK) promoters. GFP fluorescence is evaluated on day 6 of culture in the CD4⁺ and/or CD8⁺ T cell subsets by flow cytometry. See, e.g., Milone et al., Molecular Therapy 17 (8): 1453-1464 (2009). Alternatively, a mixture of CD4⁺ and CD8⁺ T cells are stimulated with αCD3/αCD28 coated magnetic beads on day 0, and transduced with CAR on day 1 using a bicistronic lentiviral vector expressing CAR along with eGFP using a 2A ribosomal skipping sequence. Cultures are re-stimulated with either a cancer associated antigen as described herein⁺ K562 cells (K562 expressing a cancer associated antigen as described herein), wild-type K562 cells (K562 wild type) or K562 cells expressing hCD32 and 4-1BBL in the presence of anti-CD3 and anti-CD28 antibody (K562-BBL-3/28) following washing. Exogenous IL-2 is added to the cultures every other day at 100 IU/ml. GFP⁺ T cells are enumerated by flow cytometry using bead-based counting. See, e.g., Milone et al., Molecular Therapy 17 (8): 1453-1464 (2009).

[0994] Sustained CAR+ T cell expansion in the absence of re-stimulation can also be measured. See, e.g., Milone et al., Molecular Therapy 17 (8): 1453-1464 (2009). Briefly, mean T cell volume (fl) is measured on day 8 of culture using a Coulter Multisizer III particle counter, a Nexcelom Cellometer Vision or Millipore Scepter, following stimulation with αCD3/αCD28 coated magnetic beads on day 0, and transduction with the indicated CAR on day 1.

[0995] Animal models can also be used to measure a CART activity. For example, xenograft model using human a cancer associated antigen described herein-specific CAR+ T cells to treat a primary human pre-B ALL in immunodeficient mice can be used. See, e.g., Milone et al., Molecular Therapy 17 (8): 1453-1464 (2009). Very briefly, after establishment of ALL, mice are randomized as to treatment groups. Different numbers of a cancer associated antigen-specific CAR engineered T cells are coinjected at a 1:1 ratio into NOD-SCID-γ^{-/-} mice bearing B-ALL. The number of copies of a cancer associated antigen-specific CAR vector in spleen DNA from mice is evaluated at various times following T cell injection. Animals are assessed for leukemia at weekly intervals. Peripheral blood a cancer associate antigen as described herein⁺ B-ALL blast cell counts are measured in mice that are injected with a cancer associated antigen described herein-ζ CAR⁺ T cells or mock-transduced T cells. Survival curves for the groups are compared using the log-rank test. In addition, absolute peripheral blood CD4⁺ and CD8⁺ T cell counts 4 weeks following T cell injection in NOD-SCID-γ^{-/-} mice can also be analyzed. Mice are injected with leukemic cells and 3 weeks later are injected with T cells engineered to express CAR by a bicistronic lentiviral vector that encodes the CAR linked to eGFP. T cells are normalized to 45-50% input GFP⁺ T cells by mixing with mock-transduced cells prior to injection, and confirmed by flow cytometry. Animals are assessed for leukemia at 1-week intervals. Survival curves for the CAR⁺ T cell groups are compared using the log-rank test.

[0996] Dose dependent CAR treatment response can be evaluated. See, e.g., Milone et al., Molecular Therapy 17 (8): 1453-1464 (2009). For example, peripheral blood is obtained 35-70 days after establishing leukemia in mice injected on day 21 with CAR T cells, an equivalent number of mock-transduced T cells, or no T cells. Mice from each group are randomly bled for determination of peripheral blood a cancer associate antigen as described herein⁺ ALL blast counts and then killed on days 35 and 49. The remaining animals are evaluated on days 57 and 70.

[0997] Assessment of cell proliferation and cytokine production has been previously described, e.g., at Milone et al., Molecular Therapy 17 (8): 1453-1464 (2009). Briefly, assessment of CAR-mediated proliferation is performed in microtiter plates by mixing washed T cells with K562 cells expressing a cancer associated antigen described herein (K19) or CD32 and CD137 (KT32-BBL) for a final T-cell:K562 ratio of 2:1. K562 cells are irradiated with gamma-radiation prior to use. Anti-CD3 (clone OKT3) and anti-CD28 (clone 9.3) monoclonal antibodies are added to cultures with KT32-BBL cells to serve as a positive control for stimulating T-cell proliferation since these signals support long-term CD8⁺ T cell expansion ex vivo. T cells are enumerated in cultures using CountBright™ fluorescent beads (Invitrogen, Carlsbad, CA) and flow cytometry as described by the manufacturer. CAR⁺ T cells are identified by GFP expression using T cells that are engineered with eGFP-2A linked CAR-expressing lentiviral vectors. For CAR+ T cells not expressing GFP, the CAR+ T cells are detected with biotinylated recombinant a cancer associate antigen as described herein protein and a secondary avidin-PE conjugate. CD4+ and CD8⁺ expression on T cells are also simultaneously detected with specific monoclonal antibodies (BD Biosciences). Cytokine measurements are performed on supernatants collected 24 hours following re-stimulation using the human TH1/TH2 cytokine cytometric bead array kit (BD Biosciences, San Diego, CA) according the manufacturer's instructions. Fluorescence is assessed using a FACScalibur flow cytometer, and data is analyzed according to the manufacturer's instructions.

[0998] Cytotoxicity can be assessed by a standard 51Cr-release assay. See, e.g., Milone et al., Molecular Therapy 17 (8): 1453-1464 (2009). Briefly, target cells (K562 lines and primary pro-B-ALL cells) are loaded with 51Cr (as NaCrO4, New England Nuclear, Boston, MA) at 37° C. for 2 hours with frequent agitation, washed twice in complete RPMI and plated into microtiter plates. Effector T cells are mixed with target cells in the wells in complete RPMI at varying ratios of effector cell:target cell (E:T). Additional wells containing media only (spontaneous release, SR) or a 1% solution of triton-X 100 detergent (total release, TR) are also prepared. After 4 hours of incubation at 37° C., supernatant from each well is harvested. Released 51Cr is then measured using a gamma particle counter (Packard Instrument Co., Waltham, MA). Each condition is performed in at least triplicate, and the percentage of lysis is calculated using the formula: % Lysis=(ER−SR)/(TR−SR), where ER represents the average 51Cr released for each experimental condition.

[0999] Imaging technologies can be used to evaluate specific trafficking and proliferation of CARs in tumor-bearing animal models. Such assays have been described, for example, in Barrett et al., Human Gene Therapy 22:1575-1586 (2011). Briefly, NOD/SCID/γc^{-/-} (NSG) mice are injected IV with Nalm-6 cells followed 7 days later with T cells 4 hour after electroporation with the CAR constructs. The T cells are stably transfected with a lentiviral construct to express firefly luciferase, and mice are imaged for bioluminescence. Alternatively, therapeutic efficacy and specificity of a single injection of CAR⁺ T cells in Nalm-6 xenograft model can be measured as the following: NSG mice are injected with Nalm-6 transduced to stably express firefly luciferase, followed by a single tail-vein injection of T cells electroporated with CAR 7 days later. Animals are imaged at various time points post injection. For example, photon-density heat maps of firefly luciferase-positive leukemia in representative mice at day 5 (2 days before treatment) and day 8 (24 hr post CAR⁺PBLs) can be generated.

[1000] Other assays, including those described in the Example section herein as well as those that are known in the art can also be used to evaluate the cells and cells expressing CARs described herein.

### Delivery Timing

[1001] In an embodiment, one or more nucleic acid molecules (e.g., DNA molecules) other than the components of a Cas system, e.g., the Cas9 molecule component and/or the gRNA molecule component described herein, are delivered. In an embodiment, the nucleic acid molecule is delivered at the same time as one or more of the components of the Cas system are delivered. In an embodiment, the nucleic acid molecule is delivered before or after (e.g., less than about 30 minutes, 1 hour, 2 hours, 3 hours, 6 hours, 9 hours, 12 hours, 1 day, 2 days, 3 days, 1 week, 2 weeks, or 4 weeks) one or more of the components of the Cas system are delivered. In an embodiment, the nucleic acid molecule is delivered by a different means than one or more of the components of the Cas system, e.g., the Cas9 molecule component and/or the gRNA molecule component, are delivered. The nucleic acid molecule can be delivered by any of the delivery methods described herein. For example, the nucleic acid molecule can be delivered by a viral vector, e.g., an integration-deficient lentivirus, and the Cas9 molecule component and/or the gRNA molecule component can be delivered by electroporation, e.g., such that the toxicity caused by nucleic acids (e.g., DNAs) can be reduced. In an embodiment, the nucleic acid molecule encodes a therapeutic protein, e.g., a protein described herein. In an embodiment, the nucleic acid molecule encodes an RNA molecule, e.g., an RNA molecule described herein.

### Bi-Modal or Differential Delivery of Components

[1002] Separate delivery of the components of a Cas system, e.g., the Cas9 molecule component and the gRNA molecule component, and more particularly, delivery of the components by differing modes, can enhance performance, e.g., by improving tissue specificity and safety. In an embodiment, the Cas9 molecule and the gRNA molecule are delivered by different modes, or as sometimes referred to herein as differential modes. Different or differential modes, as used herein, refer modes of delivery, that confer different pharmacodynamic or pharmacokinetic properties on the subject component molecule, e.g., a Cas9 molecule, gRNA molecule, template nucleic acid, or payload. E.g., the modes of delivery can result in different tissue distribution, different half-life, or different temporal distribution, e.g., in a selected compartment, tissue, or organ.

[1003] Some modes of delivery, e.g., delivery by a nucleic acid vector that persists in a cell, or in progeny of a cell, e.g., by autonomous replication or insertion into cellular nucleic acid, result in more persistent expression of and presence of a component. Examples include viral, e.g., adeno associated virus or lentivirus, delivery.

[1004] By way of example, the components, e.g., a Cas9 molecule and a gRNA molecule, can be delivered by modes that differ in terms of resulting half-life or persistent of the delivered component the body, or in a particular compartment, tissue or organ. In an embodiment, a gRNA molecule can be delivered by such modes. The Cas9 molecule component can be delivered by a mode which results in less persistence or less exposure of it to the body or a particular compartment or tissue or organ.

[1005] More generally, in an embodiment, a first mode of delivery is used to deliver a first component and a second mode of delivery is used to deliver a second component. The first mode of delivery confers a first pharmacodynamic or pharmacokinetic property. The first pharmacodynamic property can be, e.g., distribution, persistence, or exposure, of the component, or of a nucleic acid that encodes the component, in the body, a compartment, tissue or organ. The second mode of delivery confers a second pharmacodynamic or pharmacokinetic property. The second pharmacodynamic property can be, e.g., distribution, persistence, or exposure, of the component, or of a nucleic acid that encodes the component, in the body, a compartment, tissue or organ.

[1006] In an embodiment, the first pharmacodynamic or pharmacokinetic property, e.g., distribution, persistence or exposure, is more limited than the second pharmacodynamic or pharmacokinetic property.

[1007] In an embodiment, the first mode of delivery is selected to optimize, e.g., minimize, a pharmacodynamic or pharmacokinetic property, e.g., distribution, persistence or exposure.

[1008] In an embodiment, the second mode of delivery is selected to optimize, e.g., maximize, a pharmacodynamic or pharmacokinetic property, e.g., distribution, persistence or exposure.

[1009] In an embodiment, the first mode of delivery comprises the use of a relatively persistent element, e.g., a nucleic acid, e.g., a plasmid or viral vector, e.g., an AAV or lentivirus. As such vectors are relatively persistent product transcribed from them would be relatively persistent.

[1010] In an embodiment, the second mode of delivery comprises a relatively transient element, e.g., an RNA or protein.

[1011] In an embodiment, the first component comprises gRNA, and the delivery mode is relatively persistent, e.g., the gRNA is transcribed from a plasmid or viral vector, e.g., an AAV or lentivirus. Transcription of these genes would be of little physiological consequence because the genes do not encode for a protein product, and the gRNAs are incapable of acting in isolation. The second component, a Cas9 molecule, is delivered in a transient manner, for example as mRNA or as protein, ensuring that the full Cas9 molecule/gRNA molecule complex is only present and active for a short period of time.

[1012] Furthermore, the components can be delivered in different molecular form or with different delivery vectors that complement one another to enhance safety and tissue specificity.

[1013] Use of differential delivery modes can enhance performance,’ safety and efficacy. For example, the likelihood of an eventual off-target modification can be reduced. Delivery of immunogenic components, e.g., Cas9 molecules, by less persistent modes can reduce immunogenicity, as peptides from the bacterially-derived Cas enzyme are displayed on the surface of the cell by MHC molecules. A two-part delivery system can alleviate these drawbacks.

[1014] Differential delivery modes can be used to deliver components to different, but overlapping target regions. The formation active complex is minimized outside the overlap of the target regions. Thus, in an embodiment, a first component, e.g., a gRNA molecule is delivered by a first delivery mode that results in a first spatial, e.g., tissue, distribution. A second component, e.g., a Cas9 molecule is delivered by a second delivery mode that results in a second spatial, e.g., tissue, distribution. In an embodiment, the first mode comprises a first element selected from a liposome, nanoparticle, e.g., polymeric nanoparticle, and a nucleic acid, e.g., viral vector. The second mode comprises a second element selected from the group. In an embodiment, the first mode of delivery comprises a first targeting element, e.g., a cell specific receptor or an antibody, and the second mode of delivery does not include that element. In an embodiment, the second mode of delivery comprises a second targeting element, e.g., a second cell specific receptor or second antibody.

[1015] When the Cas9 molecule is delivered in a virus delivery vector, a liposome, or polymeric nanoparticle, there is the potential for delivery to and therapeutic activity in multiple tissues, when it may be desirable to only target a single tissue. A two-part delivery system can resolve this challenge and enhance tissue specificity. If the gRNA molecule and the Cas9 molecule are packaged in separated delivery vehicles with distinct but overlapping tissue tropism, the fully functional complex is only be formed in the tissue that is targeted by both vectors.

[1016] In one aspect, the delivery is accomplished ex vivo.

### XIII. Modified Nucleosides, Nucleotides, and Nucleic Acids

[1017] Modified nucleosides and modified nucleotides can be present in nucleic acids, e.g., particularly gRNA, but also other forms of RNA, e.g., mRNA, RNAi, or siRNA. As described herein “nucleoside” is defined as a compound containing a five-carbon sugar molecule (a pentose or ribose) or derivative thereof, and an organic base, purine or pyrimidine, or a derivative thereof. As described herein, “nucleotide” is defined as a nucleoside further comprising a phosphate group.

[1018] Modified nucleosides and nucleotides can include one or more of:
[1019] (i) alteration, e.g., replacement, of one or both of the non-linking phosphate oxygens and/or of one or more of the linking phosphate oxygens in the phosphodiester backbone linkage;
[1020] (ii) alteration, e.g., replacement, of a constituent of the ribose sugar, e.g., of the 2′ hydroxyl on the ribose sugar;
[1021] (iii) wholesale replacement of the phosphate moiety with “dephospho” linkers;
[1022] (iv) modification or replacement of a naturally occurring nucleobase, including with a non-canonical nucleobase;
[1023] (v) replacement or modification of the ribose-phosphate backbone;
[1024] (vi) modification of 3′ end or 5′ end of the oligonucleotide, e.g., removal, modification or replacement of a terminal phosphate group or conjugation of a moiety, cap or linker; and
[1025] (vii) modification or replacement of the sugar.

[1026] The modifications listed above can be combined to provide modified nucleosides and nucleotides that can have two, three, four, or more modifications. For example, a modified nucleoside or nucleotide can have a modified sugar and a modified nucleobase. In an embodiment, every base of a gRNA is modified, e.g., all bases have a modified phosphate group, e.g., all are phosphorothioate groups. In an embodiment, all, or substantially all, of the phosphate groups of a unimolecular or modular gRNA molecule are replaced with phosphorothioate groups.

[1027] In an embodiment, modified nucleotides, e.g., nucleotides having modifications as described herein, can be incorporated into a nucleic acid, e.g., a “modified nucleic acid.” In some embodiments, the modified nucleic acids comprise one, two, three or more modified nucleotides. In some embodiments, at least 5% (e.g., at least about 5%, at least about 10%, at least about 15%, at least about 20%, at least about 25%, at least about 30%, at least about 35%, at least about 40%, at least about 45%, at least about 50%, at least about 55%, at least about 60%, at least about 65%, at least about 70%, at least about 75%, at least about 80%, at least about 85%, at least about 90%, at least about 95%, or about 100%) of the positions in a modified nucleic acid are a modified nucleotides.

[1028] Unmodified nucleic acids can be prone to degradation by, e.g., cellular nucleases. For example, nucleases can hydrolyze nucleic acid phosphodiester bonds. Accordingly, in one aspect the modified nucleic acids described herein can contain one or more modified nucleosides or nucleotides, e.g., to introduce stability toward nucleases.

[1029] In some embodiments, the modified nucleosides, modified nucleotides, and modified nucleic acids described herein can exhibit a reduced innate immune response when introduced into a population of cells, both in vivo and ex vivo. The term “innate immune response” includes a cellular response to exogenous nucleic acids, including single stranded nucleic acids, generally of viral or bacterial origin, which involves the induction of cytokine expression and release, particularly the interferons, and cell death. In some embodiments, the modified nucleosides, modified nucleotides, and modified nucleic acids described herein can disrupt binding of a major groove interacting partner with the nucleic acid. In some embodiments, the modified nucleosides, modified nucleotides, and modified nucleic acids described herein can exhibit a reduced innate immune response when introduced into a population of cells, both in vivo and ex vivo, and also disrupt binding of a major groove interacting partner with the nucleic acid.

### Definitions of Chemical Groups

[1030] As used herein, “alkyl” is meant to refer to a saturated hydrocarbon group which is straight-chained or branched. Example alkyl groups include methyl (Me), ethyl (Et), propyl (e.g., n-propyl and isopropyl), butyl (e.g., n-butyl, isobutyl, t-butyl), pentyl (e.g., n-pentyl, isopentyl, neopentyl), and the like. An alkyl group can contain from 1 to about 20, from 2 to about 20, from 1 to about 12, from 1 to about 8, from 1 to about 6, from 1 to about 4, or from 1 to about 3 carbon atoms.

[1031] As used herein, “aryl” refers to monocyclic or polycyclic (e.g., having 2, 3 or 4 fused rings) aromatic hydrocarbons such as, for example, phenyl, naphthyl, anthracenyl,

[1032] phenanthrenyl, indanyl, indenyl, and the like. In some embodiments, aryl groups have from 6 to about 20 carbon atoms.

[1033] As used herein, “alkenyl” refers to an aliphatic group containing at least one double bond. As used herein, “alkynyl” refers to a straight or branched hydrocarbon chain containing 2-12 carbon atoms and characterized in having one or more triple bonds. Examples of alkynyl groups include, but are not limited to, ethynyl, propargyl, and 3-hexynyl.

[1034] As used herein, “arylalkyl” or “aralkyl” refers to an alkyl moiety in which an alkyl hydrogen atom is replaced by an aryl group. Aralkyl includes groups in which more than one hydrogen atom has been replaced by an aryl group. Examples of “arylalkyl” or “aralkyl” include benzyl, 2-phenylethyl, 3-phenylpropyl, 9-fluorenyl, benzhydryl, and trityl groups.

[1035] As used herein, “cycloalkyl” refers to a cyclic, bicyclic, tricyclic, or polycyclic non-aromatic hydrocarbon groups having 3 to 12 carbons. Examples of cycloalkyl moieties include, but are not limited to, cyclopropyl, cyclopentyl, and cyclohexyl.

[1036] As used herein, “heterocyclyl” refers to a monovalent radical of a heterocyclic ring system. Representative heterocyclyls include, without limitation, tetrahydrofuranyl, tetrahydrothienyl, pyrrolidinyl, pyrrolidonyl, piperidinyl, pyrrolinyl, piperazinyl, dioxanyl, dioxolanyl, diazepinyl, oxazepinyl, thiazepinyl, and morpholinyl.

[1037] As used herein, “heteroaryl” refers to a monovalent radical of a heteroaromatic ring system. Examples of heteroaryl moieties include, but are not limited to, imidazolyl, oxazolyl, thiazolyl, triazolyl, pyrrolyl, furanyl, indolyl, thiophenyl pyrazolyl, pyridinyl, pyrazinyl, pyridazinyl, pyrimidinyl, indolizinyl, purinyl, naphthyridinyl, quinolyl, and pteridinyl.

### Phosphate Backbone Modifications

### The Phosphate Group

[1038] In some embodiments, the phosphate group of a modified nucleotide can be modified by replacing one or more of the oxygens with a different substituent. Further, the modified nucleotide, e.g., modified nucleotide present in a modified nucleic acid, can include the wholesale replacement of an unmodified phosphate moiety with a modified phosphate as described herein. In some embodiments, the modification of the phosphate backbone can include alterations that result in either an uncharged linker or a charged linker with unsymmetrical charge distribution.

[1039] Examples of modified phosphate groups include, phosphorothioate, phosphoroselenates, borano phosphates, borano phosphate esters, hydrogen phosphonates, phosphoroamidates, alkyl or aryl phosphonates and phosphotriesters. In some embodiments, one of the non-bridging phosphate oxygen atoms in the phosphate backbone moiety can be replaced by any of the following groups: sulfur(S), selenium (Se), BR3 (wherein R can be, e.g., hydrogen, alkyl, or aryl), C (e.g., an alkyl group, an aryl group, and the like), H, NR2 (wherein R can be, e.g., hydrogen, alkyl, or aryl), or OR (wherein R can be, e.g., alkyl or aryl). The phosphorous atom in an unmodified phosphate group is achiral. However, replacement of one of the non-bridging oxygens with one of the above atoms or groups of atoms can render the phosphorous atom chiral; that is to say that a phosphorous atom in a phosphate group modified in this way is a stereogenic center. The stereogenic phosphorous atom can possess either the “R” configuration (herein Rp) or the “S” configuration (herein Sp).

[1040] Phosphorodithioates have both non-bridging oxygens replaced by sulfur. The phosphorus center in the phosphorodithioates is achiral which precludes the formation of oligoribonucleotide diastereomers. In some embodiments, modifications to one or both non-bridging oxygens can also include the replacement of the non-bridging oxygens with a group independently selected from S, Se, B, C, H, N, and OR (R can be, e.g., alkyl or aryl).

[1041] The phosphate linker can also be modified by replacement of a bridging oxygen, (i.e., the oxygen that links the phosphate to the nucleoside), with nitrogen (bridged phosphoroamidates), sulfur (bridged phosphorothioates) and carbon (bridged methylenephosphonates). The replacement can occur at either linking oxygen or at both of the linking oxygens.

### Replacement of the Phosphate Group

[1042] The phosphate group can be replaced by non-phosphorus containing connectors. In some embodiments, the charge phosphate group can be replaced by a neutral moiety.

[1043] Examples of moieties which can replace the phosphate group can include, without limitation, e.g., methyl phosphonate, hydroxylamino, siloxane, carbonate, carboxymethyl, carbamate, amide, thioether, ethylene oxide linker, sulfonate, sulfonamide, thioformacetal, formacetal, oxime, methyleneimino, methylenemethylimino, methylenehydrazo, methylenedimethylhydrazo and methyleneoxymethylimino.

### Replacement of the Ribophosphate Backbone

[1044] Scaffolds that can mimic nucleic acids can also be constructed wherein the phosphate linker and ribose sugar are replaced by nuclease resistant nucleoside or nucleotide surrogates. In some embodiments, the nucleobases can be tethered by a surrogate backbone. Examples can include, without limitation, the morpholino, cyclobutyl, pyrrolidine and peptide nucleic acid (PNA) nucleoside surrogates.

### Sugar Modifications

[1045] The modified nucleosides and modified nucleotides can include one or more modifications to the sugar group. For example, the 2′ hydroxyl group (OH) can be modified or replaced with a number of different “oxy” or “deoxy” substituents. In some embodiments, modifications to the 2′ hydroxyl group can enhance the stability of the nucleic acid since the hydroxyl can no longer be deprotonated to form a 2′-alkoxide ion. The 2′-alkoxide can catalyze degradation by intramolecular nucleophilic attack on the linker phosphorus atom.

[1046] Examples of “oxy”-2′ hydroxyl group modifications can include alkoxy or aryloxy (OR, wherein “R” can be, e.g., alkyl, cycloalkyl, aryl, aralkyl, heteroaryl or a sugar); polyethyleneglycols (PEG), 0(CH₂CH₂0)ₙCH2CH₂OR wherein R can be, e.g., H or optionally substituted alkyl, and n can be an integer from 0 to 20 (e.g., from 0 to 4, from 0 to 8, from 0 to 10, from 0 to 16, from 1 to 4, from 1 to 8, from 1 to 10, from 1 to 16, from 1 to 20, from 2 to 4, from 2 to 8, from 2 to 10, from 2 to 16, from 2 to 20, from 4 to 8, from 4 to 10, from 4 to 16, and from 4 to 20). In some embodiments, the “oxy”-2′ hydroxyl group modification can include “locked” nucleic acids (LNA) in which the 2′ hydroxyl can be connected, e.g., by a Ci-₆ alkylene or Cj-6 heteroalkylene bridge, to the 4′ carbon of the same ribose sugar, where exemplary bridges can include methylene, propylene, ether, or amino bridges; O-amino (wherein amino can be, e.g., NH₂; alkylamino, dialkylamino, heterocyclyl, arylamino, diarylamino, heteroarylamino, or diheteroarylamino, ethylenediamine, or polyamino) and aminoalkoxy, 0(CH₂)ₙ-amino, (wherein amino can be, e.g., NH₂; alkylamino, dialkylamino, heterocyclyl, arylamino, diarylamino, heteroarylamino, or diheteroarylamino, ethylenediamine, or polyamino). In some embodiments, the “oxy”-2′ hydroxyl group modification can include the methoxyethyl group (MOE), (OCH₂CH₂OCH₃, e.g., a PEG derivative).

[1047] “Deoxy” modifications can include hydrogen (i.e. deoxyribose sugars, e.g., at the overhang portions of partially ds RNA); halo (e.g., bromo, chloro, fluoro, or iodo); amino (wherein amino can be, e.g., NH₂; alkylamino, dialkylamino, heterocyclyl, arylamino, diarylamino, heteroarylamino, diheteroarylamino, or amino acid); NH (CH₂CH₂NH)ₙCH₂CH₂-amino (wherein amino can be, e.g., as described herein), —NHC(0) R (wherein R can be, e.g., alkyl, cycloalkyl, aryl, aralkyl, heteroaryl or sugar), cyano; mercapto; alkyl-thio-alkyl; thioalkoxy; and alkyl, cycloalkyl, aryl, alkenyl and alkynyl, which may be optionally substituted with e.g., an amino as described herein.

[1048] The sugar group can also contain one or more carbons that possess the opposite stereochemical configuration than that of the corresponding carbon in ribose. Thus, a modified nucleic acid can include nucleotides containing e.g., arabinose, as the sugar. The nucleotide “monomer” can have an alpha linkage at the I position on the sugar, e.g., alpha-nucleosides. The modified nucleic acids can also include “abasic” sugars, which lack a nucleobase at C—. These abasic sugars can also be further modified at one or more of the constituent sugar atoms. The modified nucleic acids can also include one or more sugars that are in the L form, e.g. L-nucleosides.

[1049] Generally, RNA includes the sugar group ribose, which is a 5-membered ring having an oxygen. Exemplary modified nucleosides and modified nucleotides can include, without limitation, replacement of the oxygen in ribose (e.g., with sulfur(S), selenium (Se), or alkylene, such as, e.g., methylene or ethylene); addition of a double bond (e.g., to replace ribose with cyclopentenyl or cyclohexenyl); ring contraction of ribose (e.g., to form a 4-membered ring of cyclobutane or oxetane); ring expansion of ribose (e.g., to form a 6- or 7-membered ring having an additional carbon or heteroatom, such as for example, anhydrohexitol, altritol, mannitol, cyclohexanyl, cyclohexenyl, and morpholino that also has a phosphoramidate backbone). In some embodiments, the modified nucleotides can include multicyclic forms (e.g., tricyclo; and “unlocked” forms, such as glycol nucleic acid (GNA) (e.g., R-GNA or S-GNA, where ribose is replaced by glycol units attached to phosphodiester bonds), threose nucleic acid (TNA, where ribose is replaced with a-L-threofuranosyl-(3′-→2′).

### Modifications on the Nucleobase

[1050] The modified nucleosides and modified nucleotides described herein, which can be incorporated into a modified nucleic acid, can include a modified nucleobase. Examples of nucleobases include, but are not limited to, adenine (A), guanine (G), cytosine (C), and uracil (U). These nucleobases can be modified or wholly replaced to provide modified nucleosides and modified nucleotides that can be incorporated into modified nucleic acids. The nucleobase of the nucleotide can be independently selected from a purine, a pyrimidine, a purine or pyrimidine analog. In some embodiments, the nucleobase can include, for example, naturally-occurring and synthetic derivatives of a base.

### Uracil

[1051] In some embodiments, the modified nucleobase is a modified uracil. Exemplary nucleobases and nucleosides having a modified uracil include without limitation pseudouridine (ψ), pyridin-4-one ribonucleoside, 5-aza-uridine, 6-aza-uridine, 2-thio-5-aza-uridine, 2-thio-uridine (s2U), 4-thio-uridine (s4U), 4-thio-pseudouridine, 2-thio-pseudouridine, 5-hydroxy-uridine (ho⁵U), 5-aminoallyl-uridine, 5-halo-uridine (e.g., 5-iodo-uridine or 5-bromo-uridine), 3-methyl-uridine (m³U), 5-methoxy-uridine (mo⁵U), uridine 5-oxyacetic acid (cmo⁵U), uridine 5-oxyacetic acid methyl ester (mcmo\hat{ }U), 5-carboxymethyl-uridine (cm^{s}U), 1-carboxymethyl-pseudouridine, 5-carboxyhydroxymethyl-uridine (chm⁵U), 5-carboxyhydroxymethyl-uridine methyl ester (mchm⁵U), 5-methoxycarbonylmethyl-uridine (mcm⁵U), 5-methoxycarbonylmethyl-2-thio-uridine (mcm⁵s2U), 5-aminomethyl-2-thio-uridine (nm⁵s2U), 5-methylaminomethyl-uridine (mnm⁵U), 5-methylaminomethyl-2-thio-uridine (mnm⁵s2U), 5-methylaminomethyl-2-seleno-uridine (mnm⁵se²U), 5-carbamoylmethyl-uridine (ncm⁵U), 5-carboxymethylaminomethyl-uridine (cmnm⁵U), 5-carboxymethylaminomethyl-2-thio-uridine (cmnm \s2U), 5-propynyl-uridine, 1-propynyl-pseudouridine, 5-taurinomethyl-uridine (xcm⁵U), 1-taurinomethyl-pseudouridine, 5-taurinomethyl-2-thio-uridine (Trn⁵s2U), 1-taurinomethyl-4-thio-pseudouridine, 5-methyl-uridine (m⁵U, i.e., having the nucleobase deoxythymine), 1-methyl-pseudouridine (ιτι′ψ). 5-methyl-2-thio-uridine (m⁵s2U), 1-methyl-4-thio-pseudouridine (m′s \|/), 4-thio-1-methyl-pseudouridine, 3-methyl-pseudouridine (m′V), 2-thio-1-methyl-pseudouridine, 1-methyl-1-deaza-pseudouridine, 2-thio-1-methyl-1-deaza-pseudouridine, dihydroundine (D), dihydropseudoundine, 5,6-dihydrouridine, 5-methyl-dihydrouridine (m⁵D), 2-thio-dihydrouridine, 2-thio-dihydropseudouridine, 2-methoxy-uridine, 2-methoxy-4-thio-uridine, 4-methoxy-pseudouridine, 4-methoxy-2-thio-pseudouridine, N1-methyl-pseudouridine, 3-(3-amino-3-carboxypropyl) uridine (acp³U), 1-methyl-3-(3-amino-3-carboxypropy pseudouridine 5-(isopentenylaminomethyl) uridine (inm⁵U), 5-(isopentenylaminomethy])-2-thio-uridine (inm⁵s2U), a-thio-uridine, 2′-0-methyl-uridine (Urn), 5,2′-0-dimethyl-uridine (m⁵Um), 2′-0-methyl-pseudouridine (ψπι), 2-thio-2′-0-methyl-uridine (s2Um), 5-methoxycarbonylmethyl-2′-0-methyl-uridine (mcm⁵Um), 5-carbamoylmethyl-2′-0-methyl-uridine (ncm⁵Um), 5-carboxymethylaminomethyl-2′-0-methyl-uridine (cmnm⁵Um), 3,2′-0-dimethyl-uridine (m3Um), 5-(isopentenylaminomethyl)-2′-0-methyl-uridine (inm⁵Um), 1-thio-uridine, deoxythymidine, 2′-F-ara-uridine, 2′-F-uridine, 2′-OH-ara-uridine, 5-(2-carbomethoxyvinyl) uridine, 5-[3-(1-E-propenylamino) uridine, pyrazolo[3,4-d]pyrimidines, xanthine, and hypoxanthine.

### Cytosine

[1052] In some embodiments, the modified nucleobase is a modified cytosine. Exemplary nucleobases and nucleosides having a modified cytosine include without limitation 5-aza-cytidine, 6-aza-cytidine, pseudoisocytidine, 3-methyl-cytidine (m³C), N4-acetyl-cytidine (act), 5-formyl-cytidine (f⁵C), N4-methyl-cytidine (m⁴C), 5-methyl-cytidine (m⁵C), 5-halo-cytidine (e.g., 5-iodo-cytidine), 5-hydroxymethyl-cytidine (hm⁵C), 1-methyl-pseudoisocytidine, pyrrolo-cytidine, pyrrolo-pseudoisocytidine, 2-thio-cytidine (s2C), 2-thio-5-methyl-cytidine, 4-thio-pseudoisocytidine, 4-thio-1-methyl-pseudoisocytidine, 4-thio-1-methyl-1-deaza-pseudoisocytidine, 1-methyl-1-deaza-pseudoisocytidine, zebularine, 5-aza-zebularine, 5-methyl-zebularine, 5-aza-2-thio-zebularine, 2-thio-zebularine, 2-methoxy-cytidine, 2-methoxy-5-methyl-cytidine, 4-methoxy-pseudoisocytidine, 4-methoxy-1-methyl-pseudoisocytidine, lysidine (k²C), a-thio-cytidine, 2′-0-methyl-cytidine (Cm), 5,2′-0-dimethyl-cytidine (m⁵Cm), N4-acetyl-2′-0-methyl-cytidine (ac⁴Cm), N4,2′-0-dimethyl-cytidine (m⁴Cm), 5-formyl-2′-0-methyl-cytidine (f⁵Cm), N4,N4,2′-0-trimethyl-cytidine (m⁴₂Cm), 1-thio-cytidine, 2′-F-ara-cytidine, 2′-F-cytidine, and 2′-OH-ara-cytidine.

### Adenine

[1053] In some embodiments, the modified nucleobase is a modified adenine. Exemplary nucleobases and nucleosides having a modified adenine include without limitation 2-amino-purine, 2,6-diaminopurine, 2-amino-6-halo-purine (e.g., 2-amino-6-chloro-purine), 6-halo-purine (e.g., 6-chloi-purine), 2-amino-6-methyl-purine, 8-azido-adenosine, 7-deaza-adenine, 7-deaza-8-aza-adenine, 7-deaza-2-amino-purine, 7-deaza-8-aza-2-amino-purine, 7-deaza-2,6-diaminopurine, 7-deaza-8-aza-2,6-diaminopurine, 1-methyl-adenosine (m′A), 2-methyl-adenine (m A), N6-methyl-adenosine (m⁶A), 2-methylthio-N6-methyl-adenosine (ms2m⁶A), N6-isopentenyl-adenosine (i⁶A), 2-methylthio-N6-isopentenyl-adenosine (ms²i⁶A), N6-(cis-hydroxyisopentenyl) adenosine (io⁶A), 2-methylthio-N6-(cis-hydroxyisopentenyl) adenosine (ms2io⁶A), N6-glycinylcarbamoyl-adenosine (g⁶A), N6-threonylcarbamoyl-adenosine (t⁶A), N6-methyl-N6-threonylcarbamoyl-adenosine (m⁶t⁶A), 2-methylthio-N6-threonylcarbamoyl-adenosine (ms²g⁶A), N6,N6-dimethyl-adenosine (m⁶₂A), N6-hydroxynorvalylcarbamoyl-adenosine (hn⁶A), 2-methylthio-N6-hydroxynorvalylcarbamoyl-adenosine (ms2hn⁶A), N6-acetyl-adenosine (ac⁶A), 7-methyl-adenine, 2-methylthio-adenine, 2-methoxy-adenine, a-thio-adenosine, 2′-0-methyl-adenosine (Am), N6,2′-0-dimethyl-adenosine (m⁵Am), N⁶-Methyl-2′-deoxyadenosine, N6,N6,2′-0-trimethyl-adenosine (m⁶₂Am), 1,2′-0-dimethyl-adenosine (m′ Am), 2′-0-ribosyladenosine (phosphate) (Ar(p)), 2-amino-N6-methyl-purine, 1-thio-adenosine, 8-azido-adenosine, 2′-F-ara-adenosine, 2′-F-adenosine, 2′-OH-ara-adenosine, and N6-(19-amino-pentaoxanonadecyl)-adenosine.

### Guanine

[1054] In some embodiments, the modified nucleobase is a modified guanine. Exemplary nucleobases and nucleosides having a modified guanine include without limitation inosine (I), 1-methyl-inosine (m′1), wyosine (imG), methylwyosine (mimG), 4-demethyl-wyo″sine (imG-14), isowyosine (imG2), wybutosine (yW), peroxywybutosine (ozyW), hydroxywybutosine (OHyW), undemriodified hydroxywybutosine (OHyW*), 7-deaza-guanosine, queuosine (Q), epoxyqueuosine (oQ), galactosyl-queuosine (galQ), mannosyl-queuosine (manQ), 7-cyano-7-deaza-guanosine (preQ₀), 7-aminomethyl-7-deaza-guanosine (preQi), archaeosine (G⁺), 7-deaza-8-aza-guanosine, 6-thio-guanosine, 6-thio-7-deaza-guanosine, 6-thio-7-deaza-8-aza-guanosine, 7-methyl-guanosine (m⁷G), 6-thio-7-methyl-guanosine, 7-methyl-inosine, 6-methoxy-guanosine, 1-methyl-guanosine (m′G), N2-methyl-guanosine (m²G), N2,N2-dimethyl-guanosine (m²₂G), N2,7-dimethyl-guanosine (m²,7G), N2, N2,7-dimethyl-guanosine (m²,2,7G), 8-oxo-guanosine, 7-methyl-8-oxo-guanosine, 1-meth thio-guanosine, N2-methyl-6-thio-guanosine, N2,N2-dimethyl-6-thio-guanosine, a-thio-guanosine, 2′-0-methyl-guanosine (Gm), N2-methyl-2′-0-methyl-guanosine (m¾m), N2,N2-dimethyl-2′-0-methyl-guanosine (m²₂Gm), 1-methyl-2′-0-methyl-guanosine (m′Gm), N2,7-dimethyl-2′-0-methyl-guanosine (m²,7Gm), 2′-0-methyl-inosine (Im), 1,2′-0-dimethyl-inosine (m′lm), 0⁶-phenyl-2′-deoxyinosine, 2′-0-ribosylguanosine (phosphate) (Gr(p)), 1-thio-guanosine, 0⁶-methy]-guanosine, 0⁶-Methyl-2′-deoxyguanosine, 2′-F-ara-guanosine, and 2′-F-guanosine.

Modified gRNAs

[1055] In some embodiments, the modified nucleic acids can be modified gRNAs. In some embodiments, gRNAs can be modified at the 3′ end. In this embodiment, the gRNAs can be modified at the 3′ terminal U ribose. For example, the two terminal hydroxyl groups of the U ribose can be oxidized to aldehyde groups and a concomitant opening of the ribose ring to afford a modified nucleoside, wherein U can be an unmodified or modified uridine.

[1056] In another embodiment, 3′ terminal U can be modified with a 2′ 3′ cyclic phosphate, wherein U can be an unmodified or modified uridine. In some embodiments, the gRNA molecules may contain 3′ nucleotides which can be stabilized against degradation, e.g., by incorporating one or more of the modified nucleotides described herein. In this embodiment, e.g., uridines can be replaced with modified uridines, e.g., 5-(2-amino) propyl uridine, and 5-bromo uridine, or with any of the modified uridines described herein; adenosines and guanosines can be replaced with modified adenosines and guanosines, e.g., with modifications at the 8-position, e.g., 8-bromo guanosine, or with any of the modified adenosines or guanosines described herein. In some embodiments, deaza nucleotides, e.g., 7-deaza-adenosine, can be incorporated into the gRNA. In some embodiments, O- and N-alkylated nucleotides, e.g., N6-methyl adenosine, can be incorporated into the gRNA. In some embodiments, sugar-modified ribonucleotides can be incorporated, e.g., wherein the 2′ OH-group is replaced by a group selected from H, —OR, —R (wherein R can be, e.g., methyl, alkyl, cycloalkyl, aryl, aralkyl, heteroaryl or sugar), halo, —SH, —SR (wherein R can be, e.g., alkyl, cycloalkyl, aryl, aralkyl, heteroaryl or sugar), amino (wherein amino can be, e.g., NH₂; alkylamino, dialkylamino, heterocyclyl, arylamino, diarylamino, heteroarylamino, diheteroarylamino, or amino acid); or cyano (—CN). In some embodiments, the phosphate backbone can be modified as described herein, e.g., with a phosphothioate group. In some embodiments, the nucleotides in the overhang region of the gRNA can each independently be a modified or unmodified nucleotide including, but not limited to 2′-sugar modified, such as, 2-F 2′-O-methyl, thymidine (T), 2′-O-methoxyethyl-5-methyluridine (Teo), 2′-O-methoxyethyladenosine (Aco), 2′-O-methoxyethyl-5-methylcytidine (m5Ceo), and any combinations thereof.

[1057] In an embodiment, a one or more or all of the nucleotides in single stranded overhang of an RNA molecule, e.g., a gRNA molecule, are deoxynucleotides.

[1058] Candidate Cas molecules, e.g., Cas9 molecules, candidate gRNA molecules, candidate Cas9 molecule/gRNA molecule complexes, and candidate CRISPR systems, can be evaluated by art-known methods or as described herein. For example, exemplary methods for evaluating the endonuclease activity of Cas9 molecule are described, e.g., in Jinek el al., SCIENCE 2012; 337 (6096): 8 16-821.

### EXAMPLES

### Example 1: Assays

### Guide Selection

[1059] Initial guide selection was performed in silico using a human reference genome and user defined genomic regions of interest (e.g., a gene, an exon of a gene, an intron of a gene, a non-coding regulatory region, etc.), for identifying PAMs in the regions of interest. For each identified PAM, analyses were performed and statistics reported. gRNA molecules were further selected and rank-ordered based on a number of criteria known in the art. gRNA molecules were then tested as described herein for cutting efficiency and indel formation as described herein.

### Generation of CRISPR CAR T Cells

[1060] Isolated and frozen Pan T cells were thawed and activated with CD3/CD28 beads (CD3/CD28 CTS Dynabeads® 43205D) on day 0. Activated T cells were cultured until day 3 then electroporated to introduce CRISPR/Cas systems in the form of pre-complexed gRNA/Cas9 ribonuclear protein (“RNP”). To form RNP, all RNA samples were heated at 95 C. S. pyogenes CAS9 Protein (NLS CAS9 iPROT106154, 37 μM) was diluted in buffer before tracrRNA (having the sequence: AGCAUAGCAAGUUAAAAUAAGGCUAGUCCGUUAUCAACUUGAAAAAGUGGCAC CGAGUCGGUGCUUU (SEQ ID NO: 85); IDT) was added to it. After mixing CAS9 Protein with tracrRNA, the crRNA was added (in each case, each crRNA comprised the sequence nnnnnnnnnnnnnnnnnnnn GUUUUAGAGCUAUGCU (SEQ ID NO: 10562), where the n residues represent the 20 ribonucleic acid residues of the indicated targeting domain sequence; IDT). Where single gRNA molecules were used, unless indicated otherwise, the sequence of the gRNA molecule was nnnnnnnnnnnnnnnnnnnnGUUUUAGAGCUAGAAAUAGCAAGUUAAAAUAAGGCUAGU CCGUUAUCAACUUGAAAAAGUGGCACCGAGUCGGUGCUUUU (SEQ ID NO: 10563), where the n residues represent the 20 ribonucleic acid residues of the indicated targeting domain sequence). The precomplexed RNPs were then added to a total of 0.2 million cells, RNP concentration was 1.1 μM. Electroporation was done by neon electroporator using Neon® Transfection System 100 μL Kit (MPK10096) at 1600V, 10 ms, 3 pulses. The cells were kept in culture for 7 more days by using T cell complete medium at 37C with 5% CO2.

### Transfection of HEK-293_Cas9GFP Cells for Primary Guide Screening

[1061] Transfection of Cas9GFP-expressing HEK293 cells (HEK-293_Cas9GFP) can be used for primary screening of target specific crRNAs. In this example, target specific crRNAs are designed and selected for primary screening using defined criteria including in silico off-target detection, e.g., as described herein. Selected crRNAs are chemically synthesized and delivered in a 96 well format. HEK-293-Cas9GFP cells are transfected with target crRNAs comprising a flagpole region of SEQ ID NO: 79 in a 1:1 ratio with stock trRNA of SEQ ID NO: 65. The transfection is mediated using lipofection technology according to manufacturer's protocol (DharmaFECT Duo, GE LifeSciences; or RNAiMax, LifeTechnologies). Transfected cells are lysed 24 h following lipofection and editing (e.g., cleavage) is detected within lysates with the T7E1 assay and/or next generation sequencing (NGS; below).

### T7E1 Assay

[1062] The T7E1 assay is used to detect mutation events in genomic DNA such as insertions, deletions and substitutions created through non-homologous end joining (NHEJ) following DNA cleavage by Cas9 (See Cho et al., Targeted genome engineering in human cells with the Cas9 RNA-guided endonuclease. Nature Biotechnology. 2013; 31, 230-232).

[1063] Genomic DNA regions that have been targeted for cutting by CRISPR/Cas9 are amplified by PCR, denatured at 95° C. for 10 minutes, and then re-annealed by ramping down from 95° C. to 25° C. at 0.5° C. per second. If mutations are present within the amplified region, the DNA is combined to form heteroduplexes. The re-annealed heteroduplexes are then digested with T7E1 (New England Biolabs) at 37° C. for 1 hour. T7E1 endonuclease recognizes DNA mismatches, heteroduplexes and nicked double stranded DNA and generates a double stranded break at these sites. The resulting DNA fragments are analyzed using a Fragment Analyzer and quantified to determine cleavage efficiency.

### Next-Generation Sequencing (NGS) and Analysis for On-Target Cleavage Efficiency and Indel Formation

[1064] To determine the efficiency of editing (e.g., cleaving) the target location in the genome, deep sequencing is utilized to identify the presence of insertions and deletions introduced by non-homologous end joining.

[1065] PCR primers are first designed around the target site, and the genomic area of interest PCR amplified. Additional PCR is performed according to manufacturer's protocols (Illumina) to add the necessary chemistry for sequencing. The amplicons are then sequenced on an Illumina MiSeq instrument. The reads are then aligned to the human reference genome (e.g., hg38) after eliminating those having low quality scores. From the resulting files containing the reads mapped to the reference genome (BAM files), reads which overlap the target region of interest are selected and the number of wild type reads versus the number of reads which contain an insertion or deletion is calculated. The editing percentage is then defined as the total number of reads with insertions or deletions over the total number of reads, including wild type. To determine the pattern of insertions and/or deletions that result from the edit, the aligned reads with indels are selected and the number of a reads with a given indel are summed. This information is then displayed as a list as well as visualized in the form on histograms which represent the frequency of each indel.

### RNP Generation

[1066] The addition of crRNA and trRNA (for a dgRNA), or chimeric gRNA (for sgRNA) to Cas9 protein results in the formation of the active Cas9 ribonucleoprotein complex (RNP), which mediates binding to the target region specified by the crRNA and specific cleavage of the targeted genomic DNA. This complex is formed by loading trRNA and crRNA into Cas9, which is believed to cause conformational changes to Cas9 allowing it to bind and cleave dsDNA.

[1067] The crRNA and trRNA are separately denatured at 95° C. for 2 minutes, and are allowed to come to room temperature. Cas9 protein (10 mg/ml) is added to 5×CCE buffer (20 mM HEPES, 100 mM KCl, 5 mM MgCl2, 1 mM DTT, 5% glycerol), to which trRNA and crRNAs is added (in separate reactions) and incubated at 37° C. for 10 minutes, thereby forming the active RNP complex. The complex is delivered by electroporation and other methods into a wide variety of cells, including HEK-293 and CD3+ T cells.

### Delivery of RNPs to T Cells

[1068] CD3+ T cells are comprised of multiple T cell populations including CD4+T helper cells and CD8+ cytotoxic T cells. These cells can be isolated from whole blood or from leukophoresis samples. T cells can be modified to specifically target cancerous cells and to be less immunogenic, by engineering patient T cells using Cas9-mediated editing. This example describes a basic method used to deliver Cas9 RNP, for example, Cas9 RNP targeting a TET2 intron, in T cells. Only the targeting crRNA in the RNP would need to be changed to adapt this protocol to a different T cell target (e.g., any of those provided herein).

[1069] T cells are first enriched from a leukopak using a commercially available kit (e.g., EasySep™ Human T Cell Isolation Kit, Stem Cell Technology). Enriched T cells are aliquoted and frozen down (at 10×10⁶/vial) for future use. Vials are subsequently thawed as needed, and activated by addition of 3:1 ratio of CD3/CD28 beads (Dynabeads, Life Technologies) or using ImmunoCult Human CD3/CD28 T cell Activator (Stem Cell Technologies) in T cell media (RPMI 1640, FBS, L-glutamine, non-essential amino acids, sodium pyruvate, HEPES buffer, 2-mercaptoethanol and optionally IL2). RNPs are generated as described herein, and are added to ˜50,000-100,000 CD3+ T cells resuspended in P3 buffer and nucleofected using the Amaxa nucleofection program EO-115. T cell media is added to cells immediately post-nucleofection and cultured for 24 h or more.

[1070] Additional assays, including those for assaying the function of a resulting CAR T cell population, are known in the art and described herein, e.g., cytokine production assay, T cell proliferation assay. See, e.g., WO2017049166A1, which is incorporated by reference in its entirety.

### Example 2: Evaluation of Cas9 Variants

### Evaluation in CD34+ Hematopoietic Stem Cells

[1071] We evaluated 14 purified Streptococcus pyogenes Cas9 (SPyCas9) proteins by measuring their efficiency of knocking out the beta-2-microglobulin (B2M) gene in primary human hematopoietic stem cells (HSCs). These proteins were divided into 3 groups: the first group consisted of SPyCas9 variants with improved selectivity (Slaymaker et al. 2015, Science 351:84 (e1.0, e1.1 and K855A); Kleinstiver et al. 2016, Nature 529:490 (HF)). The second group consisted of wild type SPyCas9 with different numbers and/or positions of the SV40 nuclear localization signal (NLS) and the 6×Histidine (His6) (SEQ ID NO: 108) or 8×Histidine (His8) (SEQ ID NO: 109) tag with or without a cleavable TEV site, and a SPyCas9 protein with two cysteine substitutions (C80L, C574E), which have been reported to stabilize Cas9 for structural studies (Nishimasu et al. 2014, Cell 156:935). The third group consisted of the same recombinant SPyCas9 produced by different processes (FIG. 1). B2M knockout was determined by FACS and next generation sequencing (NGS).

### Methods

### Materials

[1072] 1. Neon electroporation instrument (Invitrogen, MPK5000)
[1073] 2. Neon electroporation kit (Invitrogen, MPK1025)
[1074] 3. crRNA (comprising a targeting domain to B2M fused to SEQ ID NO: 79)
[1075] 4. tracrRNA (SEQ ID NO: 65)
[1076] 5. Cas9 storage buffer: 20 mM Tris-Cl, pH 8.0, 200 mM KCl, 10 mM MgCl₂
[1077] 6. Bone marrow derived CD34+ HSCs (Lonza, 2M-101C)
[1078] 7. Cell culture media (Stemcell Technologies, StemSpam SFEM II with StemSpam CC-100)
[1079] 8. FACS wash buffer: 2% FCS in PBS
[1080] 9. FACS block buffer: per mL PBS, add 0.5 ug mouse IgG, 150 ug Fc block, 20 uL FCS
[1081] 10. Chelex suspension: 10% Chelex 100 (bioRad, Cat #142-1253) in H₂O
[1082] 11. Anti-B2M antibody: Biolegend, cat #316304

### Process

[1083] Thaw and grow the cells following Lonza's recommendations, add media every 2-3 days. On day 5, pellet the cells at 200×g for 15 min, wash once with PBS, resuspend the cells with T-buffer from NEON kit at 2×10⁴/uL, put on ice. Dilute Cas 9 protein with Cas9 storage buffer to 5 mg/ml. Reconstitute crRNA and tracrRNA to 100 uM with H₂O. The ribonucleoprotein (RNP) complex is made by mixing 0.8 uL each of CAS 9 protein, crRNA and tracrRNA with 0.6 uL of Cas9 storage buffer, incubate at room temperature for 10 min. Mix 7 μL of HSCs with RNP complex for two minutes and transfer the entire 10 uL into a Neon pipette tip, electroporate at 1700 v, 20 ms and 1 pulse. After electroporation, immediately transfer cells into a well of 24-well plate containing 1 ml media pre-calibrated at 37° C., 5% CO₂. Harvest cells 72 hrs post-electroporation for FACS and NGS analysis.

[1084] FACS: take 250 μL of the cells from each well of 24-well plate, to wells of 96-well U-bottom plate and pellet the cells. Wash once with 2% FCS (fetal calf serum)-PBS. Add 50 uL FACS block buffer to the cells and incubate on ice for 10 minutes, add 1 uL FITC labeled B2M antibody and incubate for 30 minutes. Wash with 150 uL FACS wash buffer once followed by once more with 200 uL FACS wash buffer once. Cells were resuspended in 200 uL FACS buffer FACS analysis.

[1085] NGS sample prep: transfer 250 μL of cell suspension from each well of the 24-well plate to a 1.5 ml Eppendorf tube, add 1 mL PBS and pellet the cells. Add 100 μL of Chelex suspension, incubate at 99° C. for 8 minutes and vortex 10 seconds followed by incubating at 99° C. for 8 minutes, vortex 10 seconds. Pellet down the resin by centrifuging at 10,000×g for 3 minutes and the supernatant lysate is used for PCR. Take 4 uL lysate and do PCR reaction with primers flanking the B2M gRNA target sequence using Titanium kit (Clonetech, cat #639208) and follow the manufacturer's instruction. The following PCR conditions are used: 5 minutes at 98° C. for 1 cycle; 15 seconds at 95° C., 15 seconds at 62° C., and 1 minute at 72° C. for 30 cycles; and finally 3 minutes at 72° C. for 1 cycle. The PCR product was used for NGS.

[1086] Statistics: The percentage of B2M KO cells by FACS and the percentage of indels by NGS are used to evaluate the CAS 9 cleavage efficiency. The experiment was designed with Cas9 as fixed effect. Each experiment is nested within donors, as nested random effects. Therefore, the mixed linear model was applied for the analysis of FACS and NGS data.

### Results

[1087] In order to normalize the experimental and donor variations, we graphed the relative activity of each protein to iProt105026, the original design with two SV40 NLS flanking the wild type SPyCas9 and the His6 tag (SEQ ID NO: 108) at the C-terminal of the protein (FIG. 1). The statistical analysis shows that compared with the reference Cas9 protein iProt105026, iProt106331, iProt106518, iProt106520 and iProt106521 are not significantly different in knocking out B2M in HSCs, while the other variants tested (PID426303, iProt106519, iProt106522, iProt106545, iProt106658, iProt106745, iProt106746, iProt106747, iProt106884) are highly significantly different from the reference iProt105026 in knocking out B2M in HSCs. We found that moving the His6 tag (SEQ ID NO: 108) from the C-terminal to N-terminal (iProt106520) did not affect the activity of the protein (FIG. 1). One NLS was sufficient to maintain activity only when it was placed at the C-terminal of the protein (iProt106521 vs. iProt106522, FIG. 1). Proteins purified from process 1 had consistent higher knockout efficiency than those from processes 2 and 3 (iProt106331 vs. iProt106545 & PID426303, FIG. 1). In general, the SPyCas9 variants with a reported improved selectivity were not as active as the wild type SPyCas9 (iProt106745, iProt106746 and iProt106747, FIG. 1). Interestingly iProt106884 did not cut the targeting site. This is consistent with the report by Kleinstiver et al that this variant failed to cut up to 20% of the legitimate targeting sites in mammalian cells (Kleinstiver et al. 2016, Nature 529:490). Finally, the Cas9 variant with two cysteine substitutions (iProt106518) maintained high levels of enzymatic activity (FIG. 1).

### Evaluation in T Cells

### Methods

[1088] The different S Pyogenes Cas9 variants shown in Table 14 were used in these experiments. The structures are also shown in FIG. 1.

TABLE 14
Cas9 variants (NLS = SV40 NLS; Cas9 = S. Pyogenes
Cas9 wild type, with any mutations indicated in parenthesis;
Cas9e1.1 (as described in Slaymaker et al. 2015, Science
351: 84); GGS = glycine-glycine-serine).

| | CAS9 | | | Molar |
|---|---|---|---|---|
| | (His6 disclosed as SEQ ID | Size | Conc | conc. |
| iprot | NO: 108) | (Daltons) | (ug/ml) | [uM] |
| 106520 | His6-GGS-NLS-CAS9-NLS | 161696.22 | 6.2 | 38.34 |
| 106518 | NLS-CAS9(C80L, C574E)- | 161531.04 | 6.5 | 40.24 |
| | NLS-His6 | | | |
| 106521 | NLS-CAS9-His6 | 160629.9 | 6 | 37.12 |
| 106745 | NLS-CAS9(K855A)-NLS- | 161437.94 | 5.9 | 36.55 |
| | His6 | | | |
| 106747 | NLS-CAS9e1.1-NLS-His6 | 161295.74 | 6.5 | 40.3 |
| 106154 | NLS-CAS9-NLS-His6 | 161495.04 | 5.9 | 36.54 |
| (also | | | | |
| referred | | | | |
| to as | | | | |
| 105026) | | | | |

[1089] PBMC were isolated from human blood (obtained from Hemacare/ALL Cells) by using centrifugation method using Ficoll (GE Healthcare catalog #17-1440-03). Total T cells were isolated from these PBMC's using human Pan T Cell Isolation Kit (Miltenyi Biotec #130-096-535). These cells were aliquoted, frozen using CRYOSTOR CS10 media (Biolife Solution-210102), and stored in liquid nitrogen. These frozen cell aliquots were then thawed in a 37 degree C. water bath for 20 secs and then transferred to a 50 ml conical tube in 10 ml of pre-warmed T cell media and centrifuged at 300 rpm for 5-10 mins at 24 degrees C. to remove the freezing media and resuspended with prewarmed T cell media. These are then activated by using CD3/CD28 beads (DynaBeads Invitrogen Cat #111.41D) at a bead to cell ratio of 3:1 at keeping the cell concentration at 0.5 million/ml and activated using CD3/CD28 beads (DynaBeads Invitrogen Cat #111.41D) at bead to cell ratio of 3:1 at 0.5million/ml concentration of cells.

[1090] On Day3 post bead activation, the 200,000 cells are used per electroporation. RNP complex used for T cell genome editing was formed using a 1:2 molar ratio of Cas9 protein to RNA (crRNA and tracRNA). 100 uM crRNA ([targeting domain]-[SEQ ID NO: 79]) and 100 μM tracrRNA (SEQ ID NO: 65) were denatured separately at 95° C. for 2 min and cooled to room temperature. In a final volume of 5 μL, 1.4 μL of Cas9 proteins at a concentration of 5.9 μg/μL was mixed with 1.6 μL of reaction buffer (20 mM Tris, pH8.0; 200 mM KCL, 10 mM MgCl2) and mixed with 1 μL of 100 uM tracrRNA at room temperature. Next 1 μL of 100 μM crRNA was added, mixed and incubated for 10 min at 37° C. High efficiency gRNAs targeting TRAC and B2M were used. These RNP's at higher concentrations were used to generate samples of RNP serial dilutions. These RNP dilutions were then used to mix with 200,000 cells in 10 ul of T Buffer (neon transfection system 10 ul Kit). Electroporation was performed by Neon electroporator using Neon® Transfection System 10 μL Kit (MPK1096) at 1600V, 10 ms, 3 pulses. Cells were cultured in T cell media without antibiotics. Cells were taken from each sample pipetted to dissociate them from beads and beads were removed by using 96 welled plate magnet and centrifuged with 100 ul of FACS buffer (Miltenyi MACS buffer catalog #130-092-987 with 0.5% BSA (Miltenyi-catalog #130-091-376) to wash the cells. Cells were then incubated with different antibodies diluted in 100 ul FACS buffer for 30 mins on ice. Cells were then washed two times with 200 ul of FACS buffer. Cells are then resuspended in 150 ul of FACS buffer and run on BD 5 laser Fortessa. Expression of TCR was detected by using anti-CD3-PercpCy5.5 (Ebiosciences 45-0037-42) and expression of B2M was detected by using anti-B2M-APC (316312 Biolegend). Flow cytometry data was analyzed using FlowJo Software.

### Results

[1091] Generation of low concentrations of RNP, and highest editing efficiency, proceeded well when RNP was generated at high concentration, and then diluted to the desired concentrations. 6 different Cas9 proteins were tested for efficiency of editing using the B2M guide in primary T cells. Editing efficiency was measured using cell surface detection by flow cytometry of the B2M protein and the results are shown in FIG. 2 (Y-axis; % Editing of B2M) 3 days after RNP electroporation at the indicated concentrations of RNP (X-axis). The different Cas9 proteins tested are indicated by their “iprot” ID numbers (see FIG. 1 and Table 14). The results are shown in FIG. 2. These data indicate that all of these variants of Cas9 are active, but Cas9 proteins 106521, 106518, and 106154 (also referred to as 105026) show higher activity in T cells, as evidenced by their greater activity at lower concentrations of RNP. Next, two different Cas9 proteins, 106884 or 106154 (also referred to as 105026), as indicated, were tested for editing efficiency using the B2M targeting guide RNA (FIG. 3, left panel) or the TRAC targeting guide (FIG. 3, right panel) by using different concentrations of RNP as indicated on the X-axis. Editing efficiency (% editing) was measured by flow cytometry by measuring the loss of cell surface expression of B2M (FIG. 3, left panel) or TCR using CD3 epsilon antibody (FIG. 3, right panel).

### Example 3: Targeting EF1α-BCMA10-CAR at TET2 Intron 9-10 in Primary Human T Cells

gRNA Design

[1092] gRNAs for SPyCas9 targeting intron 9-10 of TET2 were designed (see, e.g., Table 1, Table 2). In some embodiments, these sequences may be synthesized as dgRNA. In some embodiments, these sequences may be synthesized as sgRNA.

[1093] gRNA molecules comprising targeting domains comprising SEQ ID NOs. 10148, 10149, 10290, 10209, 10224, 10212, 10317, 10318, 10225, 10184, 10185, 10188, 10187, 10292, 10151, 10509, 10281, or 10177 were synthesized in the dual gRNA format (crRNA) for screening cutting efficiency in primary human T cells. These gRNAs contained no repeat sequences more than 30 bp in length present within 200 bp of 5′ and 3′ ends of the sgRNA targeting sites. See, e.g., FIG. 4.

gRNA Screening

[1094] crRNAs were synthesized and reconstituted in ddH₂O at 100 μM. TracrRNA (GE/Dhamarcon, Cat #U-002005-20) was reconstituted in ddH₂O at 100 μM. 5×10⁶ primary cryopreserved normal human peripheral blood CD3+T lymphocytes (AllCells, Cat #PB009-1F) were thawed at day 0 and seeded at 1×10⁶/ml in 6 well plate with X-VIVO15 medium (Lonza, cat #04-744Q) supplemented with 20 ng/ml IL2 (Cat #200-02-50 ug, PeproTech) and 2mMGlutaMax (35050-061, Gibco). Cells were activated with Dynabeads Human T-expander CD3/CD28 (Cat #11141D, Gibco) at 3:1 bead/cell ratio for 3 days.

[1095] On day 3, cells were washed and resuspend in T buffer (Neon electroporation buffer) at 2.5×10⁷ cells/ml. RNP formation was performed by mixing 1 uL NLS-Spy (wt) Cas9-NLS-His6 (SEQ ID NO: 111) (“His6” disclosed as SEQ ID NO: 108) (6.2 mg/ml, iProt106331), 1 uL crRNA (100 uM), and 1 uL TracrRNA (100 uM) and incubating at room temperature for 5 mins. 10 uL cells were mixed with 5 uL RNPs, and incubated at room temperature for 2-3 mins.

[1096] Electroporation was done by neon electroporator using Neon® Transfection System 100 μL Kit (MPK10096) at 1600V, 10 ms, 3 pulses. Cells were seeded at 1.6×10⁵ cells/200 μL in a 96-well plate and cultured at 37° C. with 5% CO₂.

[1097] 72 hr following electroporation, cells were debeaded magnetically. Approximately 100-150K cells were spun down, and cell lysate was extracted using approximately 50 μL lysis buffer (10 mMTris-HCL pH 8.0, 0.05% SDS) with proteinase K (100 ng/ml). 2 μL of the cell lysis extract was used to amplify the target sequence via primers and Titanium Taq polymerase (Cat #639242, Clontech), and then analyzed by NGS as described herein. The % editing and indel pattern analysis is described below in Table 22 and Table 23.

### Results

[1098] Among the gRNAs screened, g1, g45 and g59 had the highest cutting efficiency. However over 30% of mutant alleles created by g59 were 1 nt indels whereas less than 20% created by g1 and less than 5% created by g45 were 1 nt indels. We hypothesized that larger than 1 nt indel pattern promotes homology directed repair (HDR) based on previous observations. Therefore we chose g1 and g45 for targeting the BCMA10 CAR construct.

### Example 4: AAV Targeting Vector

[1099] An AAV6-based targeting vector was designed. See, e.g., FIG. 5. The sequence of the knock-in (KI) construct is shown below (SEQ ID NO: 126), with 5′ and 3′ homology sequences underlined.

gaattcctgttgcaaagtgacctgctttggcataactagcactctcatgataggttggcacattagttt
cctgtcaattgtgttgacaagcacatgagaatcatggaaatccttggtgttaatctaaaccagtgacta
tgcattgccagttacagttaacttccaggaaaatctcaaaattcagtgccagttacctggtagattgta
atcagttaagcaaaaagccaaatacaagccattcaccttacagagagagaagcatattcaccttacaga
gagagaagcataaatgagaaacacatcatcattgtcacagtaactgtggtaacctattgtaaaagattc
acagtgcaaaagagcctgactacatattacagtgggtaaaatggatcggtcttgtaaccggtgcctaga
gaaggtggcgcggggtaaactgggaaagtgatgtcgtgtactggctccgcctttttcccgagggtgggg
gagaaccgtatataagtgcagtagtcgccgtgaacgttctttttcgcaacgggtttgccgccagaacac
aggtaagtgccgtgtgtggttcccgcgggcctggcctctttacgggttatggcccttgcgtgccttgaa
ttacttccacctggctgcagtacgtgattcttgatcccgagcttcgggttggaagtgggtgggagagtt
cgaggccttgcgcttaaggagccccttcgcctcgtgcttgagttgaggcctggcctgggcgctggggcc
gccgcgtgcgaatctggtggcaccttcgcgcctgtctcgctgctttcgataagtctctagccatttaaa
atttttgatgacctgctgcgacgctttttttctggcaagatagtcttgtaaatgcgggccaagatctgc
acactggtatttcggtttttggggccgcgggcggcgacggggcccgtgcgtcccagcgcacatgttcgg
cgaggcggggcctgcgagcgcggccaccgagaatcggacgggggtagtctcaagctggccggcctgctc
tggtgcctggcctcgcgccgccgtgtatcgccccgccctgggcggcaaggctggcccggtcggcaccag
ttgcgtgagcggaaagatggccgcttcccggccctgctgcagggagctcaaaatggaggacgcggcgct
cgggagagcgggcgggtgagtcacccacacaaaggaaaagggcctttccgtcctcagccgtcgcttcat
gtgactccactgagtaccgggcgccgtccaggcacctcgattagttctcgagcttttggagtacgtcgt
ctttaggttggggggaggggttttatgcgatggagtttccccacactgagtgggtggagactgaagtta
ggccagcttggcacttgatgtaattctccttggaatttgccctttttgagtttggatcttggttcattc
tcaagcctcagacagtggttcaaagtttttttcttccatttcaggtgtcgtgatctagaggatccatgg
ccctccctgtcaccgccctgctgcttccgctggctcttctgctccacgccgctcggcccgaagtgcaat
tggtggaatcagggggaggacttgtgcagcctggaggatcgctgagactgtcatgtgccgtgtccggct
ttgccctgtccaaccacgggatgtcctgggtccgccgcgcgcctggaaagggcctcgaatgggtgtcgg
gtattgtgtacagcggtagcacctactatgccgcatccgtgaaggggagattcaccatcagccgggaca
actccaggaacactctgtacctccaaatgaattcgctgaggccagaggacactgccatctactactgct
ccgcgcatggcggagagtccgacgtctggggacaggggaccaccgtgaccgtgtctagcgcgtccggcg
gaggcggcagcgggggtcgggcatcagggggcggcggatcggacatccagctcacccagtccccgagct
cgctgtccgcctccgtgggagatcgggtcaccatcacgtgccgcgccagccagtcgatttcctcctacc
tgaactggtaccaacagaagcccggaaaagccccgaagcttctcatctacgccgcctcgagcctgcagt
caggagtgccctcacggttctccggctccggttccggtactgatttcaccctgaccatttcctccctgc
aaccggaggacttcgctacttactactgccagcagtcgtactccaccccctacactttcggacaaggca
ccaaggtcgaaatcaagaccactaccccagcaccgaggccacccaccccggctcctaccatcgcctccc
agcctctgtccctgcgtccggaggcatgtagacccgcagctggtggggccgtgcatacccggggtcttg
acttcgcctgcgatatctacatttgggcccctctggctggtacttgcggggtcctgctgctttcactcg
tgatcactctttactgtaagcgcggtcggaagaagctgctgtacatctttaagcaacccttcatgaggc
ctgtgcagactactcaagaggaggacggctgttcatgccggttcccagaggaggaggaaggcggctgcg
aactgcgcgtgaaattcagccgcagcgcagatgctccagcctaccagcaggggcagaaccagctctaca
acgaactcaatcttggtcggagagaggagtacgacgtgctggacaagcggagaggacgggacccagaaa
tgggcgggaagccgcgcagaaagaatccccaagagggcctgtacaacgagctccaaaaggataagatgg
cagaagcctatagcgagattggtatgaaaggggaacgcagaagaggcaaaggccacgacggactgtacc
agggactcagcaccgccaccaaggacacctatgacgctcttcacatgcaggccctgccgcctcggtaag
tcgacgcctcgactgtgccttctagttgccagccatctgttgtttgcccctcccccgtgccttccttga
ccctggaaggtgccactcccactgtcctttcctaataaaatgaggaaattgcatcgcattgtctgagta
ggtgtcattctattctggggggtggggtggggcaggacagcaagggggaggattgggaagacaatagca
ggcatgctggggatgcggtgggctctatgggatgaggggaaaatagatacatgttatatatatatatat
atatatatatgttctataccaacaaagggttcagggtataattttgcatgtaaaggggtgacccagagt
agagataaagaacaaaatattctgttgaaaaaactatgaatcaatcaacctaatgaattatcaacatgg
atgtaggtgtagttgaagaagatggtcagtgagaatatggaaacagatatcaggaattaaagtcatatt
ctagggcagaaaagcattcatggaggtattagatgatagctgaagtaatttgaagaagctggtgtgaa

[1100] The AAV6 virus was generated with a titer of 1.12E+13VG/ml (lot #1935). 5×106 primary cryopreserved normal human peripheral blood CD3+T lymphocytes (AllCells, Cat #PB009-1F) were thawed at day 0 and seeded at 0.5×106/ml in 6 well plate with X-VIVO15 medium (Lonza, cat #04-744Q) supplemented with 5% heat inactivated pooled human Male AB serum (IPLA_SERAB, Innovative Research), 2 mM of GlutaMax (Cat #35050-061, Gibco), and 5 ng/ml IL2 (Cat #200-02-50 ug PeproTech). Cells were activated with Dynabeads Human T-expander CD3/CD28 (11141D, Gibco) at 1:1 bead/cell ratio for 3 days as explained above.

[1101] On day 3, cells were debeaded magnetically, washed with 1×PBS once, and resuspended in T buffer (Neon electroporation buffer) at 2.5×10⁷ cells/ml.

[1102] Full-length 100mer sgRNA-g1 and sgRNA-g45 were synthesized. RNP formation was performed by mixing 0.325 μL NLS-Spy (wt) Cas9-NLS-His6 (SEQ ID NO: 111) (“His6” disclosed as SEQ ID NO: 108) (5.9 mg/ml, iProt109296), 0.25 uL sgRNA (100 μM), 4.4 μL buffer (20 mM Tris-Cl pH 8.0, 200 mM KCl, 10 mM MgCl₂), and incubating at room temperature for 5-10 mins. 10 uL cells were mixed with 5 uL RNPs, and incubated at room temperature for 2-3 mins.

[1103] Electroporation was done by neon electroporator using Neon® Transfection System 100 μL Kit (MPK10096) at 1600V, 10 ms, 3 pulses.

[1104] Cells were rested with 160 ul of culture medium in a 96-well plate for an hour at 30° C. with 5% CO₂. AAV6 virus was added at a MOI of 2.7×10⁶ viral genome (vg)/cell and incubated at 30° C. for 24 hr., then incubated at 37° C. with 5% CO₂.

[1105] Fresh culture medium was replenished every 2 to 3 days to maintain the cell density at <0.5-1 million/ml.

[1106] Approximately 100-150K cells were taken at Day 7, 10 and 15 for FACS staining and FACS analysis was performed on Fortessa-110513 using the reagents listed in Table 15.

TABLE 15

| | Cat# | Clone# | Vendor |
|---|---|---|---|
| Human TruStain FcX | 422302 | | BioLegend |
| Cell Staining Buffer | 420201 | | BioLegend |
| BV421 anti-human CD3 | 317344 | OKT3 | BioLegend |
| BV650 anti-human CD4 | 317435 | OKT4 | BioLegend |
| BUV395 anti-human | 563795 | RPA-T8 | BD Horizon |
| CD8 | | | |
| Biotin-Protein L | M00097 | | GenScript |
| R-Phycoerythrin | 016-110-084 | | Jackson |
| conjugated Streptavidin | | | ImmunoResearch |
| Live and dead fixable | L34975 | | Molecular Probe |
| near IR dye | | | |

### Results

[1107] 11.4% of CD3+ cells were BCMA10_CAR+ using g1-RNA and 13.5% using g45-RNA at day 7. As shown in FIG. 6, the percentage of BCMA10_CAR+ cells increased over time.

[1108] The T cell experiment was repeated from a different donor using g45. As shown in FIG. 7, the percentage of BCMA10_CAR+ cells increased over time.

[1109] The cell expansion fold change was measured from day 7 to day 10. The total cell fold expansion for RNP-AAV treated, RNP treated, and debeaded only groups were 2.7, 2.7 and 3.0 respectively. There were no dramatic differences between the groups. The expansion of BCMA-CAR+ cells from day 7 to day 10 was slightly faster than the total population (4.3 vs 2.7 fold) (FIG. 8).

### PCR Primers

[1110] To confirm correct integration at both 5′ and 3′ sites, PCR primers were designed to amplify from outside of the homology region to the BCMA10_CAR insert as shown in FIG. 9. The sequences of the primers are listed in Table 16:

TABLE 16

| | | PCR amplicon |
|---|---|---|
| Primer | Sequence | length (bp) |
| p1 | 5′-acacagccagaccatatcagcag (SEQ ID NO: | 739 |
| | 10518) | |
| p2 | 5′-aaggcacgcaagggccataacc (SEQ ID NO: | |
| | 10519) | |
| p3 | 5′-gaggcctgtgcagactactc (SEQ ID NO: | 1093 |
| | 10520) | |
| p4 | 5′-acagaaatcctatgtggcctgc (SEQ ID NO: | |
| | 10521) | |

[1111] Cells were harvested at day 10 and lysed in 50-100 ul of cell lysate buffer (10 mM Tris-HCL PH=8.0, 0.05% SDS) with proteinase K (100 ng/ml). PCR was performed using Phusion High Fidelity PCR kit (Cat #F553L, ThermoFisher). The PCR conditions are shown below in Table 17 and Table 18:

TABLE 17

| Component | 50 μL reaction | |
|---|---|---|
| ddH₂O | 34.5 | μL |
| 5x Phusion HF buffer | 10 | μL |
| 10 mM dNTP | 1 | μL |
| 10 μM primer a | 1 | μL |
| 10 μM primer b | 1 | μL |
| Cell lysate | 2 | μL |
| Phusion DNA Polymerase | 0.5 | μL |

TABLE 18

| Cycle step | Temp | Time | | Cycles |
|---|---|---|---|---|
| Initial denaturation | 98° C. | 30 | s | 1 |
| Denaturation | 98° C. | 5 | s | 35 |
| Annealing | 68° C. | 20 | s | |
| Extension | 72° C. | 20 | s | |
| Final extension | 72° C. | 1 | min | |

| | | |
|---|---|---|
| Final step | 14° C. | Hold |

[1112] 7 μL of the PCR product was run on a 2% E-gel to confirm the presence of the expected PCR band. Unpurified PCR product was sequenced with both primers.

### Example 5: Guide Screening in Human CD3+ T Cells

[1113] T cells were first enriched from a leukopak using a commercially available kit (e.g., EasySep™ Human T Cell Isolation Kit, Stem Cell Technology). Enriched T cells are aliquoted and frozen down (at 10×10⁶/vial) for future use. Vials are subsequently thawed as needed, and activated by addition of 3:1 ratio of CD3/CD28 beads (Dynabeads, Life Technologies, Cat #111.41D) in T cell media (RPMI 1640, FBS, L-glutamine, non-essential amino acids, sodium pyruvate, HEPES buffer, 2-mercaptoethanol and optionally IL2). On day 3 after bead activation, cells were removed from culture for electroporation with RNPs. RNPs are generated as described herein, and are added to ˜50,000-100,000 CD3+ T cells resuspended in P3 buffer and nucleofected using the Amaxa nucleofection program EO-115. T cell media is added to cells immediately post-nucleofection and cultured for 48 h prior to cell lysis for NGS analysis.

[1114] RNP complex used for T cell genome editing was formed using a 1:2 molar ratio of Cas9 protein to RNA (crRNA and tracRNA). 100 μM crRNA and 100 μM tracrRNA were denatured separately at 95° C. for 2 min and cooled to room temperature. In a final volume of 5 μL, 1.4 μL of Spy Cas9 protein at a concentration of 5.9 μg/μL (Cas9-NLS) was mixed with 1.6 μL of Cas9 buffer (20 mM Tris, pH8.0; 200 mM KCL, 10 mM MgCL2) and mixed with 1 μL of 100 μM tracrRNA at room temperature. Next 1 μL of 100 μM crRNA was added, mixed and incubated for 10 min at 37° C. The assembled RNPs were then mixed with 100,000 cells in 20 ul of P3 Buffer and nucleofected using the Amaxa nucleofection program EO-115. T cell media is added to cells immediately post-nucleofection and cultured for 48 h prior to cell lysis for NGS analysis. Two biological replicates with at least 3 technical replicates per run were performed for each guide.

[1115] To evaluate the editing frequency, genomic DNA was isolated and subjected to sequencing as described in Example 1. Four positive control guides were included in the experiment. The results are provided below in Table 19.

TABLE 19

| | Guide | | | gRNA targeting | SEQ ID | Average | SD |
|---|---|---|---|---|---|---|---|
| Target | ID | Coordinate | Strand | domain sequence | NO: | edit (%) | (%) |
| Tet2 | CR00 | chr4: 105271340- | + | GAAGUAGUAAAU | 10191 | 45.3% | 17.0% |
| | 7665 | 105271360 | | GAUAACUG | | | |
| Tet2 | CR00 | chr4: 105270694- | + | UAUAUGUUCUAU | 10153 | 42.9% | 27.0% |
| | 7697 | 105270714 | | ACCAACAA | | | |
| Tet2 | CR00 | chr4: 105270624- | + | UGGAUCGGUCUU | 10148 | 42.3% | 10.2% |
| | 7626 | 105270643 | | GUAAUUGG | | | |
| Tet2 | CR00 | chr4: 105270350- | − | ACUGGUUUAGAU | 10259 | 39.3% | 10.0% |
| | 7671 | 105270370 | | UAACACCA | | | |
| Tet2 | CR00 | chr4: 105272182- | − | UGUGAAGCCUCU | 10314 | 35.6% | 9.5% |
| | 7684 | 105272202 | | UCAAAAAC | | | |
| Tet2 | CR00 | chr4: 105271863- | + | UUUCAGAGUACC | 10206 | 27.1% | 6.3% |
| | 7633 | 105271883 | | CACUUAUA | | | |
| Tet2 | CR00 | chr4: 105271203- | − | AGUUAGGAAACC | 10515 | 26.8% | 6.7% |
| | 7677 | 105271223 | | AGAACCUA | | | |
| Tet2 | CR00 | chr4: 105272465- | + | ACACAAAUCUGA | 10234 | 26.7% | 14.2% |
| | 7691 | 105272485 | | AUACUGAG | | | |
| Tet2 | CR00 | chr4: 105270695- | + | AUAUGUUCUAUA | 10154 | 25.9% | 17.1% |
| | 7634 | 105270715 | | CCAACAAA | | | |
| Tet2 | CR00 | chr4: 105272324- | + | GAUAGACUCAGA | 10225 | 23.9% | 11.1% |
| | 7706 | 105272344 | | GAAAGGGU | | | |
| Tet2 | CR00 | chr4: 105271526- | + | UAUGUAUGGGAA | 10203 | 23.4% | 9.1% |
| | 7703 | 105271546 | | AAGUAACA | | | |
| Tet2 | CR00 | chr4: 105270268- | + | AUAACUAGCACU | 10136 | 20.7% | 14.2% |
| | 7675 | 105270288 | | CUCAUGAU | | | |
| Tet2 | CR00 | chr4: 105270426- | − | AUUACAAUCUAC | 10263 | 20.5% | 8.9% |
| | 7667 | 105270446 | | CAGGUAAC | | | |
| Tet2 | CR00 | chr4: 105272320- | + | UCCUGAUAGACU | 10223 | 20.3% | 17.2% |
| | 7680 | 105272340 | | CAGAGAAA | | | |
| Tet2 | CR00 | chr4: 105270144- | + | CAUGUUGAGGAG | 10131 | 20.0% | 7.0% |
| | 7655 | 105270164 | | CAGAACAC | | | |
| Tet2 | CR00 | chr4: 105272436- | + | GUCACUGAUCUG | 10233 | 19.3% | 5.5% |
| | 7632 | 105272456 | | GAUCAACU | | | |
| Tet2 | CR00 | chr4: 105271924- | + | GGUUUGACAGAG | 10209 | 18.6% | 9.2% |
| | 7648 | 105271944 | | UACAAAGG | | | |
| Tet2 | CR00 | chr4: 105270594- | + | AGCCUGACUACA | 10143 | 18.5% | 8.8% |
| | 7637 | 105270614 | | UAUUACAG | | | |
| Tet2 | CR00 | chr4: 105272323- | + | UGAUAGACUCAG | 10224 | 18.0% | 0.9% |
| | 7709 | 105272343 | | AGAAAGGG | | | |
| Tet2 | CR00 | chr4: 105271450- | + | AUUUGCCUCUGA | 10196 | 17.9% | 7.2% |
| | 7695 | 105271470 | | UAGAGCAU | | | |
| Tet2 | CR00 | chr4: 105270330- | + | AUGAGAAUCAUG | 10139 | 16.9% | 5.1% |
| | 7685 | 105270350 | | GAAAUCCU | | | |
| Tet2 | CR00 | chr4: 105270630- | + | GGUCUUGUAAUU | 10149 | 16.3% | 7.5% |
| | 7710 | 105270649 | | GGAGGCAG | | | |
| Tet2 | CR00 | chr4: 105271921- | + | UUAGGUUUGACA | 10208 | 16.2% | 16.6% |
| | 7636 | 105271941 | | GAGUACAA | | | |
| Tet2 | CR00 | chr4: 105270194- | + | AUGUUGUCUGCA | 10134 | 15.8% | 5.2% |
| | 7676 | 105270214 | | GGUUUCAC | | | |
| Tet2 | CR00 | chr4: 105270809- | − | AUCCAUGUUGAU | 10274 | 15.4% | 7.9% |
| | 7687 | 105270829 | | AAUUCAUU | | | |
| Tet2 | CR00 | chr4: 105272562- | − | CUCUAGUGAGAG | 10489 | 15.2% | 3.9% |
| | 7629 | 105272582 | | UGCAUACC | | | |
| Tet2 | CR00 | chr4: 105271855- | − | GGUACUCUGAAA | 10303 | 14.9% | 3.0% |
| | 7640 | 105271875 | | AGGGUAAG | | | |
| Tet2 | CR00 | chr4: 105271184- | + | CUGUGAGGCACA | 10184 | 14.6% | 7.3% |
| | 7627 | 105271204 | | UUAGCCGU | | | |
| Tet2 | CR00 | chr4: 105270595- | + | GCCUGACUACAU | 10144 | 13.6% | 2.3% |
| | 7630 | 105270615 | | AUUACAGU | | | |
| Tet2 | CR00 | chr4: 105270309- | − | UGCUUGUCAACA | 10258 | 13.5% | 4.9% |
| | 7650 | 105270329 | | CAAUUGAC | | | |
| Tet2 | CR00 | chr4: 105272102- | + | GUGUUCAGAAGU | 10213 | 13.4% | 4.1% |
| | 7699 | 105272122 | | AUGAGAUG | | | |
| Tet2 | CR00 | chr4: 105271378- | + | AUAUAACCAUGU | 10192 | 13.4% | 9.9% |
| | 7702 | 105271398 | | UUCAUUCC | | | |
| Tet2 | CR00 | chr4: 105270433- | − | UUAACUGAUUAC | 10264 | 13.1% | 2.1% |
| | 7678 | 105270453 | | AAUCUACC | | | |
| Tet2 | CR00 | chr4: 105269733- | + | AUGGCAGCACAU | 10102 | 13.0% | No SD |
| | 7701 | 105269753 | | UGGUAAGU | | | |
| Tet2 | CR00 | chr4: 105272557- | − | GUGAGAGUGCAU | 10488 | 12.4% | 3.6% |
| | 7638 | 105272577 | | ACCUGGUA | | | |
| Tet2 | CR00 | chr4: 105270620- | 1 | AAAUGGAUCGGU | 10147 | 11.1% | 1.8% |
| | 7659 | 105270640 | | CUUGUAAU | | | |
| Tet2 | CR00 | chr4: 105271498- | 1 | CACUAGAUAAGA | 10200 | 10.7% | 12.0% |
| | 7705 | 105271518 | | ACUGAAUA | | | |
| Tet2 | CR00 | chr4: 105270702- | + | CUAUACCAACAA | 10156 | 10.6% | 5.2% |
| | 7641 | 105270722 | | AGGGUUCA | | | |
| Tet2 | CR00 | chr4: 105272319- | + | UUCCUGAUAGAC | 10222 | 10.5% | 1.5% |
| | 7679 | 105272339 | | UCAGAGAA | | | |
| Tet2 | CR00 | chr4: 105271862- | − | AUAAGUGGGUAC | 10306 | 9.9% | 8.3% |
| | 7686 | 105271882 | | UCUGAAAA | | | |
| Tet2 | CR00 | chr4: 105272515- | + | UUCUUUGGGACC | 10237 | 9.7% | 8.5% |
| | 7647 | 105272535 | | UGUAGUUG | | | |
| Tet2 | CR00 | chr4: 105270272- | + | CUAGCACUCUCA | 10137 | 9.5% | 3.8% |
| | 7635 | 105270292 | | UGAUAGGU | | | |
| Tet2 | CR00 | chr4: 105270804- | + | AACCUAAUGAAU | 10160 | 9.4% | 3.4% |
| | 7698 | 105270824 | | UAUCAACA | | | |
| Tet2 | CR00 | chr4: 105270125- | − | GAGAUGCUGCUG | 10508 | 9.4% | 8.5% |
| | 7700 | 105270145 | | AUAUGGUC | | | |
| Tet2 | CR00 | chr4: 105272558- | − | AGUGAGAGUGCA | 10494 | 8.7% | 3.8% |
| | 7661 | 105272578 | | UACCUGGU | | | |
| Tet2 | CR00 | chr4: 105270599- | − | ACCCACUGUAAU | 10270 | 8.5% | 13.3% |
| | 7649 | 105270619 | | AUGUAGUC | | | |
| Tet2 | CR00 | chr4: 105271512- | + | UGAAUAGGGUUA | 10201 | 8.4% | 9.1% |
| | 7674 | 105271532 | | AAUAUGUA | | | |
| Tet2 | CR00 | chr4: 105271338- | + | CAGAAGUAGUAA | 10189 | 7.9% | 4.4% |
| | 7690 | 105271358 | | AUGAUAAC | | | |
| Tet2 | CR00 | chr4: 105270244- | + | UGUUGCAAAGUG | 10135 | 6.9% | 10.4% |
| | 7670 | 105270264 | | ACCUGCUU | | | |
| Tet2 | CR00 | chr4: 105272232- | + | GCAAGAGAGUGC | 10217 | 6.8% | 1.3% |
| | 7662 | 105272252 | | UUCAUUUU | | | |
| Tet2 | CR00 | chr4: 105270368- | − | AACUGGCAAUGC | 10260 | 6.6% | 3.5% |
| | 7643 | 105270388 | | AUAGUCAC | | | |
| Tet2 | CR00 | chr4: 105272324- | − | ACCCUUUCUCUG | 10318 | 6.1% | 2.4% |
| | 7681 | 105272344 | | AGUCUAUC | | | |
| Tet2 | CR00 | chr4: 105270710- | − | UUAUACCCUGAA | 10271 | 6.1% | 4.4% |
| | 7657 | 105270730 | | CCCUUUGU | | | |
| Tet2 | CR00 | chr4: 105272462- | − | AGUAUUCAGAUU | 10322 | 5.5% | 15.5% |
| | 7683 | 105272482 | | UGUGUUGG | | | |
| Tet2 | CR00 | chr4: 105270131- | + | AUCAGCAGCAUC | 10130 | 5.4% | 2.4% |
| | 7672 | 105270151 | | UCAUGUUG | | | |
| Tet2 | CR00 | chr4: 105272465- | − | CUCAGUAUUCAG | 10323 | 5.4% | 5.3% |
| | 7639 | 105272485 | | AUUUGUGU | | | |
| Tet2 | CR00 | chr4: 105270412- | + | AAAAUUCAGUGC | 10141 | 5.4% | 3.7% |
| | 7642 | 105270432 | | CAGUUACC | | | |
| Tet2 | CR00 | chr4: 105270161- | + | CACUGGAAUUUA | 10132 | 5.0% | 4.3% |
| | 7651 | 105270181 | | GUAGCAUU | | | |
| Tet2 | CR00 | chr4: 105272057- | + | AACAGAGAGAGU | 10212 | 5.0% | 8.5% |
| | 7654 | 105272077 | | UAGGUGUC | | | |
| Tet2 | CR00 | chr4: 105270464- | − | UAAGGUGAAUGG | 10265 | 4.9% | 9.1% |
| | 7694 | 105270484 | | CUUGUAUU | | | |
| Tet2 | CR00 | chr4: 105270829- | + | GUAGGUGUAGUU | 10162 | 4.7% | 2.4% |
| | 7692 | 105270849 | | GAAGAAGA | | | |
| Tet2 | CR00 | chr4: 105270385- | − | UCCUGGAAGUUA | 10261 | 4.7% | 1.9% |
| | 7653 | 105270405 | | ACUGUAAC | | | |
| Tet2 | CR00 | chr4: 105271773- | − | UACUACAAUUAC | 10297 | 4.6% | 0.8% |
| | 7628 | 105271793 | | ACUAGCUU | | | |
| Tet2 | CR00 | chr4: 105271863- | − | UAUAAGUGGGUA | 10307 | 4.5% | 1.3% |
| | 7689 | 105271883 | | CUCUGAAA | | | |
| Tet2 | CR00 | chr4: 105271295- | + | AGCACCUGCUCA | 10188 | 4.3% | 3.3% |
| | 7707 | 105271315 | | UUAUUAGG | | | |
| Tet2 | CR00 | chr4: 105271449- | + | AAUUUGCCUCUG | 10195 | 4.3% | 5.2% |
| | 7669 | 105271469 | | AUAGAGCA | | | |
| Tet2 | CR00 | chr4: 105270381- | + | GCCAGUUACAGU | 10140 | 3.8% | 2.3% |
| | 7658 | 105270401 | | UAACUUCC | | | |
| Tet2 | CR00 | chr4: 105271056- | + | UUAGGGACUGCA | 10177 | 3.8% | 1.4% |
| | 7696 | 105271076 | | GGCCACAU | | | |
| Tet2 | CR00 | chr4: 105271172- | − | CCUCACAGCUUG | 10509 | 3.7% | 1.5% |
| | 7712 | 105271192 | | UGUUUGUA | | | |
| Tet2 | CR00 | chr4: 105272231- | + | AGCAAGAGAGUG | 10216 | 3.6% | 1.5% |
| | 7664 | 105272251 | | CUUCAUUU | | | |
| Tet2 | CR00 | chr4: 105272233- | + | CAAGAGAGUGCU | 10218 | 3.5% | 3.1% |
| | 7688 | 105272253 | | UCAUUUUG | | | |
| Tet2 | CR00 | chr4: 105271256- | − | AUUUUAGAUGUU | 10283 | 3.5% | 3.7% |
| | 7704 | 105271276 | | GGGGUGGU | | | |
| Tet2 | CR00 | chr4: 105270701- | + | UCUAUACCAACA | 10155 | 3.3% | 1.9% |
| | 7631 | 105270721 | | AAGGGUUC | | | |
| Tet2 | CR00 | chr4: 105270130- | − | AACAUGAGAUGC | 10522 | 3.0% | 0.9% |
| | 7652 | 105270150 | | UGCUGAUA | | | |
| Tet2 | CR00 | chr4: 105271458- | − | CAGAACCCAUGC | 10292 | 2.9% | 1.4% |
| | 7666 | 105271478 | | UCUAUCAG | | | |
| Tet2 | CR00 | chr4: 105271292- | + | CUCAGCACCUGC | 10187 | 2.5% | 4.5% |
| | 7708 | 105271312 | | UCAUUAUU | | | |
| Tet2 | CR00 | chr4: 105270245- | − | AAAGCAGGUCAC | 10256 | 2.5% | 5.9% |
| | 7660 | 105270265 | | UUUGCAAC | | | |
| Tet2 | CR00 | chr4: 105272528- | − | GACAUUACAGCC | 10324 | 2.0% | 1.1% |
| | 7693 | 105272548 | | UCAACUAC | | | |
| Tet2 | CR00 | chr4: 105272403- | + | UAACAGGUAGGA | 10231 | 1.9% | 1.3% |
| | 7682 | 105272423 | | UGGUUUUA | | | |
| Tet2 | CR00 | chr4: 105271081- | + | UUCUGUCACAUU | 10181 | 1.9% | 1.0% |
| | 7668 | 105271101 | | GUUUGGUG | | | |
| Tet2 | CR00 | chr4: 105270260- | − | AGUGCUAGUUAU | 10257 | 1.8% | 1.3% |
| | 7656 | 105270280 | | GCCAAAGC | | | |
| Tet2 | CR00 | chr4: 105270722- | + | GGGUAUAAUUUU | 10157 | 1.7% | 1.8% |
| | 7663 | 105270742 | | GCAUGUAA | | | |
| Tet2 | CR00 | chr4: 105271190- | + | GGCACAUUAGCC | 10185 | 1.6% | 0.9% |
| | 7625 | 105271210 | | GUAGGUUC | | | |
| Tet2 | CR00 | chr4: 105272309- | − | CUAUCAGGAACA | 10317 | 1.6% | 1.3% |
| | 7644 | 105272329 | | GUUAGCUG | | | |
| Tet2 | CR00 | chr4: 105270635- | + | GUAAUUGGAGGC | 10151 | 1.3% | 1.5% |
| | 7711 | 105270655 | | AGUGGUGA | | | |
| Tet2 | CR00 | chr4: 105272395- | + | UUCAUUAAUAAC | 10230 | 1.2% | 1.4% |
| | 7673 | 105272415 | | AGGUAGGA | | | |
| Tet2 | CR00 | chr4: 105270185- | + | UAGAGUAAUAUG | 10133 | 0.8% | 0.5% |
| | 7645 | 105270205 | | UUGUCUGC | | | |
| Tet2 | CR00 | chr4: 105269740- | + | CACAUUGGUAAG | 10104 | N/A | N/A |
| | 7646 | 105269760 | | UUGGGCUG | | | |
| Control | CR00 | chr1: 55039271- | − | | | 19.6% | 2.5% |
| 1 | 1261 | 55039291 | | | | | |
| Control | CR00 | chr6: 43770821- | − | | | 8.4% | 6.9% |
| 2 | 3187 | 43770841 | | | | | |
| Control | CR00 | chr11: 116827093- | − | | | 18.8% | 3.5% |
| 3 | 5017 | 116827113 | | | | | |
| Control | CR00 | chr2: 176122949- | − | | | 35.8% | 8.5% |
| 4 | 5025 | 176122969 | | | | | |

“SD” = standard deviation; “No SD” = no standard deviation due to only data from one replicate only; “N/A” = data not available due to technical error

[1116] Following the initial screen, a subset of the guides in Table 19 were evaluated again in CD3+ T cells, as described in this Example. In this analysis, in addition to total percent editing, the percent of insertion and deletion at each target sequence was determined using NGS. For each target site, two sets of primers were designed to amplify each locus. The results are plotted in FIG. 10A and FIG. 10B.

### Example 6: Validation Screen of Insertion and Deletion Percentages by Guide

[1117] An oligo insertion based assay (see, e.g., Tsai et al., Nature Biotechnology. 33, 187-197; 2015) was used to determine potential off-target genomic sites cleaved by Cas9 targeting TET2. A total of 15 guide RNAs (dual guide RNAs comprising the indicated targeting domain) targeting TET2 and six control guides were screened in the Cas9-expressing HEK293 cells described above in Example 1, and the results are plotted in FIG. 11. The assay detected high-efficiency editing at the expected target sequences, potential off-targets for some of the guides, and no off-targets for three of the guides.

[1118] Following the insertional analysis, the potential off-target sites that were identified were further evaluated in the Cas9-expressing HEK293 cells using NGS. In this experiment, the cells were transfected with target crRNAs in a 1:1 ratio with stock trRNA. The transfection was mediated using lipofection technology according to manufacturer's protocol (DharmaFECT Duo, GE LifeSciences; or RNAiMax, LifeTechnologies). Transfected cells were lysed 48 h following lipofection and editing (e.g., cleavage) was detected within lysates with next generation sequencing. Two sets of primers were designed for each site, and the resulting amplicons were sequenced, e.g., as described in Example 1. The results are provided below in Table 20.

TABLE 20

| | | | | | Editing | |
|---|---|---|---|---|---|---|
| | | | | primer | % | |
| Guide ID | Site | Coordinate | Strand | set | (average) | SD (%) |
| CR007633 | ONT | chr4: 105271863-105271883 | + | set1 | 32.8 | 7.3 |
| CR007633 | ONT | chr4: 105271863-105271883 | + | set2 | 32.2 | 7.2 |
| CR007633 | OT 01 | chrX: 8560771-8560791 | + | set1 | 0.1 | 0.1 |
| CR007633 | OT 01 | chrX: 8560771-8560791 | + | set2 | 0.1 | 0.1 |
| CR007633 | OT 02 | chr6: 109987282-109987302 | − | set1 | 0.1 | 0.0 |
| CR007633 | OT 02 | chr6: 109987282-109987302 | − | set2 | 0.1 | 0.0 |
| CR007637 | ONT | chr4: 105270594-105270614 | + | set1 | 24.4 | 7.7 |
| CR007637 | ONT | chr4: 105270594-105270614 | + | set2 | 26.7 | 8.4 |
| CR007637 | OT 01 | chrX: 28732099-28732119 | + | set1 | 0.0 | 0.1 |
| CR007637 | OT 01 | chrX: 28732099-28732119 | + | set2 | 0.0 | 0.0 |
| CR007648 | ONT | chr4: 105271924-105271944 | + | set1 | 24.3 | 9.1 |
| CR007648 | ONT | chr4: 105271924-105271944 | + | set2 | N/A | N/A |
| CR007648 | OT 01 | chr1: 62607266-62607286 | − | set1 | 0.1 | 0.0 |
| CR007648 | OT 01 | chr1: 62607266-62607286 | − | set2 | 0.2 | 0.0 |
| CR007648 | OT 02 | chr12: 6968835-6968855 | − | set1 | 0.1 | 0.0 |
| CR007648 | OT 02 | chr12: 6968835-6968855 | − | set2 | 0.1 | 0.0 |
| CR007648 | OT 03 | chr17: 34641080-34641100 | + | set1 | 0.1 | 0.1 |
| CR007648 | OT 03 | chr17: 34641080-34641100 | + | set2 | 0.1 | 0.1 |
| CR007648 | OT 04 | chr8: 142442835-142442855 | + | set1 | 0.1 | 0.0 |
| CR007648 | OT 04 | chr8: 142442835-142442855 | + | set2 | 0.4 | 0.3 |
| CR007648 | OT 05 | chr1: 44389438-44389458 | + | set1 | 0.1 | 0.0 |
| CR007648 | OT 05 | chr1: 44389438-44389458 | + | set2 | 0.1 | 0.1 |
| CR007648 | OT 06 | chr16: 57756563-57756583 | + | set1 | 0.0 | 0.1 |
| CR007648 | OT 06 | chr16: 57756563-57756583 | + | set2 | 0.0 | 0.0 |
| CR007648 | OT 07 | chr20: 37957777-37957797 | + | set1 | 0.1 | 0.1 |
| CR007648 | OT 07 | chr20: 37957777-37957797 | + | set2 | 0.0 | 0.1 |
| CR007648 | OT 08 | chr5: 94847524-94847544 | + | set1 | 0.1 | 0.0 |
| CR007648 | OT 08 | chr5: 94847524-94847544 | + | set2 | 0.0 | 0.1 |
| CR007648 | OT 09 | chr1: 149886640-149886660 | + | set1 | 0.1 | 0.1 |
| CR007648 | OT 09 | chr1: 149886640-149886660 | + | set2 | 0.2 | 0.0 |
| CR007648 | OT 10 | chr12: 79666166-79666186 | + | set1 | 0.1 | 0.0 |
| CR007648 | OT 10 | chr12: 79666166-79666186 | + | set2 | 0.1 | 0.1 |
| CR007648 | OT 11 | chr3: 157114059-157114079 | + | set1 | 0.0 | 0.0 |
| CR007648 | OT 11 | chr3: 157114059-157114079 | + | set2 | 0.0 | 0.0 |
| CR007648 | OT 12 | chr10: 43309580-43309600 | + | set1 | 0.0 | 0.1 |
| CR007648 | OT 12 | chr10: 43309580-43309600 | + | set2 | 0.0 | 0.1 |
| CR007648 | OT 13 | chr10: 81383942-81383962 | − | set1 | 0.0 | 0.0 |
| CR007648 | OT 13 | chr10: 81383942-81383962 | − | set2 | N/A | N/A |
| CR007648 | OT 14 | chr6: 146406425-146406445 | + | set1 | 0.1 | 0.1 |
| CR007648 | OT 14 | chr6: 146406425-146406445 | + | set2 | 0.1 | 0.1 |
| CR007648 | OT 15 | chrX: 129530239-129530259 | + | set1 | 0.1 | 0.1 |
| CR007648 | OT 15 | chrX: 129530239-129530259 | + | set2 | 0.0 | 0.1 |
| CR007655 | ONT | chr4: 105270144-105270164 | + | set1 | 26.5 | 25.0 |
| CR007655 | ONT | chr4: 105270144-105270164 | + | set2 | 26.5 | 25.0 |
| CR007655 | OT 01 | chr2: 7990552-7990572 | − | set1 | 0.1 | 0.1 |
| CR007655 | OT 01 | chr2: 7990552-7990572 | − | set2 | 0.1 | 0.1 |
| CR007655 | OT 02 | chr6: 129507282-129507302 | + | set1 | 0.0 | 0.1 |
| CR007655 | OT 02 | chr6: 129507282-129507302 | + | set2 | 0.0 | 0.1 |
| CR007655 | OT 03 | chr8: 63331060-63331080 | − | set1 | 2.0 | 2.1 |
| CR007655 | OT 03 | chr8: 63331060-63331080 | − | set2 | 2.1 | 2.1 |
| CR007655 | OT 04 | chr19: 34034589-34034609 | + | set1 | 4.0 | 3.9 |
| CR007655 | OT 04 | chr19: 34034589-34034609 | + | set2 | 4.4 | 4.2 |
| CR007655 | OT 05 | chr2: 19636770-19636790 | + | set1 | 0.0 | 0.1 |
| CR007655 | OT 05 | chr2: 19636770-19636790 | + | set2 | 0.0 | 0.0 |
| CR007655 | OT 06 | chr21: 41298867-41298887 | + | set1 | 0.1 | 0.2 |
| CR007655 | OT 06 | chr21: 41298867-41298887 | + | set2 | 0.1 | 0.1 |
| CR007655 | OT 07 | chr1: 239287261-239287281 | − | set1 | N/A | N/A |
| CR007655 | OT 07 | chr1: 239287261-239287281 | − | set2 | 0.1 | 0.1 |
| CR007655 | OT 08 | chr16: 750824-750844 | − | set1 | 0.1 | 0.1 |
| CR007655 | OT 08 | chr16: 750824-750844 | − | set2 | 0.1 | 0.1 |
| CR007665 | ONT | chr4: 105271340-105271360 | + | set1 | 44.9 | 11.6 |
| CR007665 | ONT | chr4: 105271340-105271360 | + | set2 | 46.1 | 11.4 |
| CR007667 | ONT | chr4: 105270426-105270446 | − | set1 | 20.5 | 2.3 |
| CR007667 | ONT | chr4: 105270426-105270446 | − | set2 | 20.3 | 1.2 |
| CR007667 | OT 01 | chr9: 129294818-129294838 | − | set1 | 0.1 | 0.1 |
| CR007667 | OT 01 | chr9: 129294818-129294838 | − | set2 | 0.1 | 0.0 |
| CR007671 | ONT | chr4: 105270350-105270370 | − | set1 | 24.8 | 2.0 |
| CR007671 | ONT | chr4: 105270350-105270370 | − | set2 | 28.2 | 2.9 |
| CR007671 | OT 01 | chr2: 224983888-224983908 | − | set1 | 0.1 | 0.1 |
| CR007671 | OT 01 | chr2: 224983888-224983908 | − | set2 | 0.1 | 0.0 |
| CR007671 | OT 02 | chr1: 34852545-34852565 | + | set1 | N/A | N/A |
| CR007671 | OT 02 | chr1: 34852545-34852565 | + | set2 | N/A | N/A |
| CR007671 | OT 03 | chr17: 81589930-81589950 | + | set1 | 5.4 | 0.5 |
| CR007671 | OT 03 | chr17: 81589930-81589950 | + | set2 | 3.2 | 1.5 |
| CR007675 | ONT | chr4: 105270268-105270288 | + | set1 | 33.8 | 4.4 |
| CR007675 | ONT | chr4: 105270268-105270288 | + | set2 | 33.0 | 2.8 |
| CR007675 | OT 01 | chrX: 7078173-7078193 | − | set1 | 1.6 | 0.2 |
| CR007675 | OT 01 | chrX: 7078173-7078193 | − | set2 | 1.6 | 0.1 |
| CR007675 | OT 02 | chr13: 33934878-33934898 | + | set1 | 0.0 | 0.1 |
| CR007675 | OT 02 | chr13: 33934878-33934898 | + | set2 | 0.0 | 0.0 |
| CR007676 | ONT | chr4: 105270194-105270214 | + | set1 | 29.2 | 5.4 |
| CR007676 | ONT | chr4: 105270194-105270214 | + | set2 | 30.8 | 5.0 |
| CR007676 | OT 01 | chr1: 47907842-47907862 | + | set1 | 0.1 | 0.1 |
| CR007676 | OT 01 | chr1: 47907842-47907862 | + | set2 | 0.1 | 0.1 |
| CR007676 | OT 02 | chr12: 93080467-93080487 | + | set1 | 0.1 | 0.1 |
| CR007676 | OT 02 | chr12: 93080467-93080487 | + | set2 | 0.1 | 0.0 |
| CR007676 | OT 03 | chrX: 39677001-39677021 | + | set1 | 0.0 | 0.1 |
| CR007676 | OT 03 | chrX: 39677001-39677021 | + | set2 | 0.1 | 0.0 |
| CR007677 | ONT | chr4: 105271203-105271223 | − | set1 | 25.1 | 3.5 |
| CR007677 | ONT | chr4: 105271203-105271223 | − | set2 | 26.3 | 2.9 |
| CR007677 | OT 01 | chr22: 43125757-43125777 | + | set1 | 0.1 | 0.1 |
| CR007677 | OT 01 | chr22: 43125757-43125777 | + | set2 | 0.1 | 0.1 |
| CR007677 | OT 02 | chr1: 175060841-175060861 | − | set1 | 0.1 | 0.1 |
| CR007677 | OT 02 | chr1: 175060841-175060861 | − | set2 | N/A | N/A |
| CR007677 | OT 03 | chr11: 63558842-63558862 | − | set1 | 0.1 | 0.0 |
| CR007677 | OT 03 | chr11: 63558842-63558862 | − | set2 | 0.0 | 0.1 |
| CR007684 | ONT | chr4: 105272182-105272202 | − | set1 | 20.5 | 8.8 |
| CR007684 | ONT | chr4: 105272182-105272202 | − | set2 | 21.1 | 6.4 |
| CR007687 | ONT | chr4: 105270809-105270829 | − | set1 | 40.2 | 12.9 |
| CR007687 | ONT | chr4: 105270809-105270829 | − | set2 | 41.5 | 12.6 |
| CR007691 | ONT | chr4: 105272465-105272485 | + | set1 | 37.8 | 0.9 |
| CR007691 | ONT | chr4: 105272465-105272485 | + | set2 | 38.0 | 1.6 |
| CR007691 | OT 01 | chr5: 167581554-167581574 | − | set1 | 0.0 | 0.1 |
| CR007691 | OT 01 | chr5: 167581554-167581574 | − | set2 | 0.1 | 0.1 |
| CR007703 | ONT | chr4: 105271526-105271546 | + | set1 | 43.8 | 10.1 |
| CR007703 | ONT | chr4: 105271526-105271546 | + | set2 | 43.5 | 10.8 |
| CR007703 | OT 01 | chr6: 152567788-152567808 | + | set1 | N/A | N/A |
| CR007703 | OT 01 | chr6: 152567788-152567808 | + | set2 | 0.1 | 0.1 |
| CR007703 | OT 02 | chrX: 147775642-147775662 | − | set1 | 0.1 | 0.0 |
| CR007703 | OT 02 | chrX: 147775642-147775662 | − | set2 | 0.3 | 0.1 |
| CR007703 | OT 03 | chr1: 73224987-73225007 | + | set1 | 0.2 | 0.1 |
| CR007703 | OT 03 | chr1: 73224987-73225007 | + | set2 | 0.3 | 0.0 |
| CR007703 | OT 04 | chrX: 86735755-86735775 | + | set1 | 0.1 | 0.1 |
| CR007703 | OT 04 | chrX: 86735755-86735775 | + | set2 | 0.0 | 0.1 |
| CR007703 | OT 05 | chr1: 185142055-185142075 | + | set1 | 0.1 | 0.0 |
| CR007703 | OT 05 | chr1: 185142055-185142075 | + | set2 | 0.1 | 0.1 |
| CR007703 | OT 06 | chr5: 24716285-24716305 | + | set1 | 0.1 | 0.1 |
| CR007703 | OT 06 | chr5: 24716285-24716305 | + | set2 | 0.0 | 0.1 |
| CR007709 | ONT | chr4: 105272323-105272343 | + | set1 | 16.6 | 1.9 |
| CR007709 | ONT | chr4: 105272323-105272343 | + | set2 | 17.5 | 1.5 |
| CR007709 | OT 01 | chr2: 129192151-129192171 | − | set1 | 0.1 | 0.1 |
| CR007709 | OT 01 | chr2: 129192151-129192171 | − | set2 | 0.1 | 0.0 |
| CR007709 | OT 02 | chr2: 227643116-227643136 | − | set1 | 0.6 | 0.1 |
| CR007709 | OT 02 | chr2: 227643116-227643136 | − | set2 | 0.4 | 0.1 |
| CR007709 | OT 03 | chr5: 138393430-138393450 | − | set1 | 1.8 | 0.2 |
| CR007709 | OT 03 | chr5: 138393430-138393450 | − | set2 | 2.3 | 0.7 |
| CR007709 | OT 04 | chr1: 112957752-112957772 | + | set1 | 0.1 | 0.1 |
| CR007709 | OT 04 | chr1: 112957752-112957772 | + | set2 | 0.1 | 0.0 |
| CR007709 | OT 05 | chr12: 68577045-68577065 | − | set1 | 0.1 | 0.1 |
| CR007709 | OT 05 | chr12: 68577045-68577065 | − | set2 | 0.1 | 0.1 |
| CR007709 | OT 06 | chr3: 81269842-81269862 | + | set1 | 0.0 | 0.1 |
| CR007709 | OT 06 | chr3: 81269842-81269862 | + | set2 | 0.1 | 0.1 |
| CR007709 | OT 07 | chr4: 99925790-99925810 | + | set1 | 0.0 | 0.1 |
| CR007709 | OT 07 | chr4: 99925790-99925810 | + | set2 | 0.0 | N/A |
| CR007709 | OT 08 | chr4: 12791779-12791799 | + | set1 | 0.1 | 0.1 |
| CR007709 | OT 08 | chr4: 12791779-12791799 | + | set2 | 0.0 | 0.1 |
| CR007709 | OT 09 | chr6: 31568852-31568872 | − | set1 | 0.1 | 0.0 |
| CR007709 | OT 09 | chr6: 31568852-31568872 | − | set2 | 0.2 | 0.1 |
| CR007709 | OT 10 | chr7: 54279191-54279211 | + | set1 | N/A | N/A |
| CR007709 | OT 10 | chr7: 54279191-54279211 | + | set2 | 0.2 | 0.1 |
| CR007709 | OT 11 | chr7: 19117788-19117808 | − | set1 | 1.2 | 1.3 |
| CR007709 | OT 11 | chr7: 19117788-19117808 | − | set2 | 1.0 | 0.4 |
| CR007709 | OT 12 | chr8: 116368538-116368558 | − | set1 | 0.1 | 0.0 |
| CR007709 | OT 12 | chr8: 116368538-116368558 | − | set2 | 0.0 | 0.1 |
| CR007709 | OT 13 | chr8: 96115257-96115277 | − | set1 | 0.2 | 0.1 |
| CR007709 | OT 13 | chr8: 96115257-96115277 | − | set2 | N/A | N/A |
| CR007709 | OT 14 | chrX: 139885150-139885170 | − | set1 | 0.1 | 0.0 |
| CR007709 | OT 14 | chrX: 139885150-139885170 | − | set2 | 0.1 | 0.0 |
| CR007709 | OT 15 | chrX: 14227411-14227431 | + | set] | 0.1 | 0.0 |
| CR007709 | OT 15 | chrX: 14227411-14227431 | + | set2 | 0.1 | 0.1 |
| CR007709 | OT 16 | chr2: 54814529-54814549 | − | set1 | 0.1 | 0.1 |
| CR007709 | OT 16 | chr2: 54814529-54814549 | − | set2 | N/A | N/A |
| CR007709 | OT 17 | chr9: 101349182-101349202 | + | set1 | 0.1 | 0.1 |
| CR007709 | OT 17 | chr9: 101349182-101349202 | + | set2 | N/A | N/A |
| CR007709 | OT 18 | chr10: 93489165-93489185 | − | set1 | 0.0 | 0.1 |
| CR007709 | OT 18 | chr10: 93489165-93489185 | − | set2 | N/A | N/A |
| CR007709 | OT 19 | chr21: 20954203-20954223 | − | set1 | 2.4 | 0.1 |
| CR007709 | OT 19 | chr21: 20954203-20954223 | − | set2 | 2.2 | 0.3 |
| CR007709 | OT 20 | chr4: 5568958-5568978 | − | set1 | 0.0 | 0.0 |
| CR007709 | OT 20 | chr4: 5568958-5568978 | − | set2 | 0.0 | 0.0 |

“ONT” = on-target site;
“OT” = off-target site;
“N/A” = no data due to technical error;
“SD” = standard deviation

### Example 7: In silico off-target analysis

[1119] Potential off-target loci for the TET2 gRNAs comprising the targeting domains of CR007626 (g1), CR007710 (g45), CR007633, CR007665, CR007677, CR007703, CR007671, CR007675, CR007684, CR007691, g59, CR007632 (g10), CR007648 (g20), CR007709 (g34), g21, g22, g23, g55, CR007627 (g2), g4, g17, g25, g42, g54, g58, g60, TI-7 (6900), and TI-8 (7600) were identified using the Cas-OFFinder algorithm (Bae et al 2014, PMID: 24463181). For each gRNA, the 20 nucleotide gRNA targeting domain sequence was analyzed against the human genome reference sequence (build GRCh38) identifying all sites with up to 5 nucleotide mismatches that are 5′ adjacent to the Cas9 canonical 5′-NGG-3′ PAM sequence (i.e. 5′-off-target locus-PAM-3′). Sites identified with 5 mismatches were filtered against RefSeq gene annotations (Pruitt et al, 2014, PMID: 24259432) to only include loci annotated as exons. Counts of the potential off-target loci identified for the TET2 gRNAs are shown in Table 21.

TABLE 21
Counts of in silico off-target loci identified for the TET2
gRNAs CR007626 (g1), CR007710 (g45), CR007633,
CR007665, CR007677, CR007703, CR007671, CR007675,
CR007684, CR007691, g59, CR007632 (g10), CR007648
(g20), CR007709 (g34), g21, g22, g23, g55, CR007627 (g2),
g4, g17, g25, g42, g54, g58, g60, TI-7 (6900), and TI-8 (7600)
with 0, 1, 2, 3 and 4 nucleotide mismatches and 5 nucleotide
mismatches in RefSeq exons are shown.

| | Number of in silico | | | | | | |
|---|---|---|---|---|---|---|---|
| | off-targets with N mismatches | | | | | | |
| | | | | | | 5 in RefSeq | Total |
| gRNA name | 0 | 1 | 2 | 3 | 4 | exons | sites |
| CR007626 (g1) | 0 | 0 | 0 | 1 | 37 | 46 | 84 |
| CR007633 | 0 | 0 | 0 | 7 | 120 | 36 | 163 |
| CR007710 | 0 | 0 | 1 | 16 | 165 | 104 | 286 |
| (g45) | | | | | | | |
| CR007665 | 0 | 0 | 1 | 14 | 223 | 69 | 307 |
| CR007677 | 0 | 0 | 0 | 15 | 177 | 79 | 271 |
| CR007703 | 0 | 0 | 0 | 16 | 285 | 87 | 388 |
| CR007671 | 0 | 0 | 0 | 10 | 128 | 49 | 187 |
| CR007675 | 0 | 0 | 1 | 6 | 63 | 26 | 96 |
| CR007684 | 0 | 0 | 1 | 15 | 143 | 102 | 261 |
| CR007691 | 0 | 0 | 0 | 19 | 188 | 82 | 289 |
| g59 | 0 | 0 | 1 | 19 | 196 | 128 | 344 |
| CR007632 | 0 | 0 | 0 | 6 | 85 | 64 | 155 |
| (g10) | | | | | | | |
| CR007648 | 0 | 0 | 0 | 9 | 132 | 68 | 209 |
| (g20) | | | | | | | |
| CR007709 | 0 | 0 | 1 | 16 | 294 | 118 | 429 |
| (g34) | | | | | | | |
| g21 | 0 | 0 | 1 | 12 | 190 | 98 | 301 |
| g22 | 0 | 0 | 0 | 8 | 95 | 60 | 163 |
| g23 | 0 | 0 | 0 | 15 | 141 | 72 | 228 |
| g55 | 0 | 0 | 0 | 29 | 313 | 111 | 453 |
| CR007627 (g2) | 0 | 0 | 0 | 2 | 48 | 52 | 102 |
| g4 | 0 | 0 | 0 | 1 | 25 | 38 | 64 |
| g17 | 0 | 0 | 0 | 7 | 78 | 58 | 143 |
| g25 | 0 | 0 | 0 | 8 | 141 | 90 | 239 |
| g42 | 0 | 0 | 0 | 9 | 94 | 67 | 170 |
| g54 | 0 | 0 | 5 | 28 | 344 | 221 | 598 |
| g58 | 0 | 0 | 5 | 29 | 659 | 111 | 804 |
| g60 | 0 | 0 | 0 | 29 | 231 | 138 | 398 |
| TI-7 (6900) | 0 | 1 | 9 | 115 | 1255 | 429 | 1809 |
| TI-8 (7600) | 0 | 2 | 4 | 53 | 546 | 254 | 859 |

[1120] Potential off-target sites will require validation in genome edited T-cells using targeted NGS analysis.

Top Indels for TET2 gRNAs

[1121] Primary human T cells were prepared as described in Example 3, and indel frequency (Table 23) and indel pattern (Table 22) assessed as described.

TABLE 22
Top five editing repair pattern variants generated by editing T-cells with dual gRNA
moleculess comprising the targeting domains of CR007626 (g1), CR007710 (g45), CR007633,
CR007665, CR007677, CR007703, CR007671, CR007675, CR007684, CR007691, g59,
CR007632 (g10), CR007648 (g20), CR007709 (g34), g21, g22, g23, g55, CR007627 (g2), g4,
g17, g25, g42, g54, g58, and g60 are shown. Variant size, variant type (Ins = insertion,
Del = deletion), reference allele, variant allele, variant start and end position relative to
chromosome 4 reference genome build GRCh38, and representative allele frequencies are shown.

| | | | | SEQ | | Variant | |
|---|---|---|---|---|---|---|---|
| gRNA | Size | | | ID | Variant | start and | Allele |
| name | (bp) | Type | Reference allele | NO: | allele | end position | frequency |
| CR7626 | 1 | Ins | T | | TT | 105270640- | 10.73% |
| (g1) | | | | | | 105270641 | |
| | −1 | Del | AT | | A | 105270639- | 9.48% |
| | | | | | | 105270640 | |
| | −15 | Del | CGGTCTTGTAATT | 10523 | C | 105270629- | 4.04% |
| | | | GGA | | | 105270644 | |
| | −17 | Del | ATGGATCGGTCTT | 10524 | A | 105270623- | 4.01% |
| | | | GTAAT | | | 105270640 | |
| | −6 | Del | TTGTAAT | | T | 105270634- | 3.82% |
| | | | | | | 105270640 | |
| CR007710 | −9 | Del | GAGGCAGTGG | 10525 | G | 105270643- | 8.60% |
| (g45) | | | | | | 105270652 | |
| | −11 | Del | GCAGTGGTGAGG | 10526 | G | 105270646- | 4.82% |
| | | | | | | 105270657 | |
| | −6 | Del | GCAGTGG | | G | 105270646- | 4.75% |
| | | | | | | 105270652 | |
| | −4 | Del | GGCAG | | G | 105270645- | 4.15% |
| | | | | | | 105270649 | |
| | −1 | Del | GG | | G | 105270645- | 3.51% |
| | | | | | | 105270646 | |
| CR007633 | −28 | Del | AGTACCCACTTAT | 10527 | A | 105271870- | 17.79% |
| | | | AT | | | 105271898 | |
| | | | GGTCATATTTCAG | | | | |
| | | | A | | | | |
| | 1 | Ins | T | | TT | 105271880- | 16.86% |
| | | | | | | 105271881 | |
| | −1 | Del | TT | | T | 105271879- | 3.88% |
| | | | | | | 105271880 | |
| | −2 | Del | CTT | | C | 105271878- | 3.33% |
| | | | | | | 105271880 | |
| | −2 | Del | TAT | | T | 105271880- | 3.17% |
| | | | | | | 105271882 | |
| CR007665 | −1 | Del | AA | | A | 105271356- | 10.91% |
| | | | | | | 105271357 | |
| | 1 | Ins | A | | AA | 105271357- | 6.84% |
| | | | | | | 105271358 | |
| | −22 | Del | TAAATGATAACTG | 10528 | T | 105271348- | 6.51% |
| | | | GGGCTATAGT | | | 105271370 | |
| | −2 | Del | TAA | | T | 105271355- | 5.71% |
| | | | | | | 105271357 | |
| | −7 | Del | ATGATAAC | | A | 105271351- | 5.56% |
| | | | | | | 105271358 | |
| CR007677 | −1 | Del | AG | | A | 105271205- | 12.15% |
| | | | | | | 105271206 | |
| | −16 | Del | CGTAGGTTCTGGT | 10529 | C | 105271202- | 9.79% |
| | | | TTCC | | | 105271218 | |
| | 1 | Ins | G | | GG | 105271206- | 5.29% |
| | | | | | | 105271207 | |
| | −2 | Del | GGT | | G | 105271206- | 4.08% |
| | | | | | | 105271208 | |
| | −4 | Del | CGTAG | | C | 105271202- | 3.11% |
| | | | | | | 105271206 | |
| CR007703 | 1 | Ins | A | | AA | 105271543- | 22.22% |
| | | | | | | 105271544 | |
| | −7 | De | GTAACAAG | | G | 105271541- | 6.11% |
| | | | | | | 105271548 | |
| | −1 | Del | TA | | T | 105271542- | 5.55% |
| | | | | | | 105271543 | |
| | −2 | Del | AAC | | A | 105271543- | 4.56% |
| | | | | | | 105271545 | |
| | −13 | Del | GGGAAAAGTAAC | 10530 | G | 105271534- | 3.76% |
| | | | AA | | | 105271547 | |
| CR007671 | −2 | Del | GTG | | G | 105270353- | 30.10% |
| | | | | | | 105270355 | |
| | 1 | Ins | G | | GT | 105270353- | 14.16% |
| | | | | | | 105270354 | |
| | −2 | Del | TGG | | T | 105270351- | 5.08% |
| | | | | | | 105270353 | |
| | −13 | Del | AAATCCTTGGTGT | 10531 | A | 105270344- | 4.91% |
| | | | T | | | 105270357 | |
| | −3 | Del | GTGT | | G | 105270353- | 3.42% |
| | | | | | | 105270356 | |
| CR007675 | 1 | Ins | T | | TT | 105270285- | 50.24% |
| | | | | | | 105270286 | |
| | −19 | Del | CTCTCATGATAGG | 10532 | C | 105270279- | 10.90% |
| | | | TTGGCAC | | | 105270298 | |
| | −28 | Del | TTTGGCATAACTA | 10533 | T | 105270263- | 2.74% |
| | | | G | | | 105270291 | |
| | | | CACTCTCATGATA | | | | |
| | | | GG | | | | |
| | −14 | Del | CTAGCACTCTCAT | 10534 | C | 105270273- | 1.95% |
| | | | GA | | | 105270287 | |
| | −1 | Del | CA | | C | 105270283- | 1.12% |
| | | | | | | 105270284 | |
| CR007684 | −1 | Del | TT | | T | 105272184- | 21.58% |
| | | | | | | 105272185 | |
| | −2 | Del | GTT | | G | 105272183- | 12.80% |
| | | | | | | 105272185 | |
| | 1 | Ins | T | | TT | 105272185- | 8.54% |
| | | | | | | 105272186 | |
| | −16 | Del | CCTGTTTTTGAAG | 10535 | C | 105272180- | 4.55% |
| | | | AGGC | | | 105272196 | |
| | −3 | Del | TTTT | | T | 105272185- | 3.54% |
| | | | | | | 105272188 | |
| CR007691 | 1 | Ins | T | | TT | 105272482- | 46.22% |
| | | | | | | 105272483 | |
| | −1 | Del | AC | | A | 105272480- | 14.29% |
| | | | | | | 105272481 | |
| | 2 | Ins | T | | TTT | 105272482- | 4.38% |
| | | | | | | 105272484 | |
| | −1 | Del | CT | | C | 105272481- | 2.64% |
| | | | | | | 105272482 | |
| | −7 | Del | TGAATACT | | T | 105272475- | 1.55% |
| | | | | | | 105272482 | |
| g59 | 1 | Ins | T | | TT | 105271390- | 18.08% |
| | | | | | | 105271391 | |
| | −1 | Del | GT | | G | 105271389- | 15.12% |
| | | | | | | 105271390 | |
| | −7 | Del | TGTTTCAT | | T | 105271388- | 7.29% |
| | | | | | | 105271395 | |
| | −12 | Del | ATGTTTCATTCCA | 10536 | A | 105271387- | 4.36% |
| | | | | | | 105271399 | |
| | −2 | Del | TTT | | T | 105271390- | 1.50% |
| | | | | | | 105271392 | |
| CR007632 | 1 | Ins | A | | AA | 105272453- | 4.74% |
| (g10) | | | | | | 105272454 | |
| | −1 | Del | CA | | C | 105272452- | 4.54% |
| | | | | | | 105272453 | |
| | −10 | Del | GATCAACTAGG | 10537 | G | 105272449- | 1.97% |
| | | | | | | 105272459 | |
| | −9 | Del | TCTGGATCAA | 10538 | T | 105272445- | 1.21% |
| | | | | | | 105272454 | |
| | −2 | Del | AAC | | A | 105272453- | 1.00% |
| | | | | | | 105272455 | |
| CR007648 | −1 | Del | AA | | A | 105271940- | 11.98% |
| (g20) | | | | | | 105271941 | |
| | −15 | Del | GTACAAAGGAGG | 10539 | G | 105271936- | 2.76% |
| | | | AGAG | | | 105271951 | |
| | −10 | Del | AGAGTACAAAG | 10540 | A | 105271933- | 2.47% |
| | | | | | | 105271943 | |
| | −2 | Del | CAA | | C | 105271939- | 2.07% |
| | | | | | | 105271941 | |
| | 1 | Ins | A | | AA | 105271941- | 2.01% |
| | | | | | | 105271942 | |
| CR007709 | −1 | Del | AA | | A | 105272339- | 6.79% |
| (g34) | | | | | | 105272340 | |
| | 1 | Ins | A | | AA | 105272340- | 4.22% |
| | | | | | | 105272341 | |
| | −2 | Del | AAA | | A | 105272338- | 2.50% |
| | | | | | | 105272340 | |
| | −6 | Del | AGAAAGG | | A | 105272336- | 1.85% |
| | | | | | | 105272342 | |
| | −6 | Del | AGAGAAA | | A | 105272334- | 1.22% |
| | | | | | | 105272340 | |
| g21 | 1 | Ins | T | | TT | 105272074- | 2.42% |
| | | | | | | 105272075 | |
| | −7 | Del | TGTCAGGT | | T | 105272074- | 0.92% |
| | | | | | | 105272081 | |
| | −7 | Del | AGTTAGGT | | A | 105272067- | 0.64% |
| | | | | | | 105272074 | |
| | −2 | Del | GGT | | G | 105272072- | 0.40% |
| | | | | | | 105272074 | |
| | −11 | Del | AGGTGTCAGGTA | 10541 | A | 105272071- | 0.16% |
| | | | | | | 105272082 | |
| g22 | −2 | Del | GCT | | G | 105272312- | 3.01% |
| | | | | | | 105272314 | |
| | −1 | Del | GC | | G | 105272312- | 1.65% |
| | | | | | | 105272313 | |
| | −3 | Del | ACAG | | A | 105272309- | 1.11% |
| | | | | | | 105272312 | |
| | −19 | Del | GAACAAGGGTCA | 10542 | G | 105272295- | 0.89% |
| | | | CCACAGCT | | | 105272314 | |
| | −10 | Del | CACCACAGCTA | 10543 | C | 105272305- | 0.80% |
| | | | | | | 105272315 | |
| g23 | 1 | Ins | T | | TA | 105272327- | 6.43% |
| | | | | | | 105272328 | |
| | −4 | Del | ATAGA | | A | 105272326- | 4.90% |
| | | | | | | 105272330 | |
| | −8 | Del | TGATAGACT | | T | 105272324- | 1.49% |
| | | | | | | 105272332 | |
| | −2 | Del | TAG | | T | 105272327- | 1.17% |
| | | | | | | 105272329 | |
| | −10 | Del | ATAGACTCAGA | 10544 | A | 105272326- | 0.80% |
| | | | | | | 105272336 | |
| g55 | −1 | Del | AG | | A | 105272340- | 7.20% |
| | | | | | | 105272341 | |
| | −2 | Del | AAG | | A | 105272339- | 4.11% |
| | | | | | | 105272341 | |
| | −3 | Del | AAAG | | A | 105272338- | 2.00% |
| | | | | | | 105272341 | |
| | −7 | Del | AGAGAAAG | | A | 105272334- | 1.63% |
| | | | | | | 105272341 | |
| CR007627 | −2 | Del | GGG | | G | 105272341- | 1.41% |
| (g2) | | | | | | 105272343 | |
| | −6 | Del | GCCGTAG | | G | 105271200- | 6.43% |
| | | | | | | 105271206 | |
| | −1 | Del | GC | | G | 105271200- | 4.18% |
| | | | | | | 105271201 | |
| | −15 | Del | GAGGCACATTAG | 10545 | G | 105271189- | 3.69% |
| | | | CCGT | | | 105271204 | |
| | −2 | Del | AGC | | A | 105271199- | 2.02% |
| | | | | | | 105271201 | |
| | −7 | Del | ACATTAGC | | A | 105271194- | 1.54% |
| | | | | | | 105271201 | |
| g4 | −6 | Del | GTTCTGG | | G | 105271207- | 0.73% |
| | | | | | | 105271213 | |
| | −2 | Del | AGG | | A | 105271205- | 0.37% |
| | | | | | | 105271207 | |
| | −1 | Del | GG | | G | 105271206- | 0.27% |
| | | | | | | 105271207 | |
| | −10 | Del | TAGGTTCTGGT | 10546 | T | 105271204- | 0.14% |
| | | | | | | 105271214 | |
| | −16 | Del | CGTAGGTTCTGGT | 10547 | C | 105271202- | 0.11% |
| | | | TTCC | | | 105271218 | |
| g17 | −1 | Del | TT | | T | 105271311- | 9.67% |
| | | | | | | 105271312 | |
| | 1 | Ins | T | | TT | 105271312- | 6.24% |
| | | | | | | 105271313 | |
| | −15 | Del | TGCTCATTATTAG | 10548 | T | 105271302- | 4.65% |
| | | | GAG | | | 105271317 | |
| | −20 | Del | TCATTATTAGGAG | 10549 | T | 105271305- | 3.10% |
| | | | GCTATGCT | | | 105271325 | |
| | −2 | Del | ATT | | A | 105271310- | 2.89% |
| | | | | | | 105271312 | |
| g25 | −3 | Del | CATT | | C | 105271306- | 4.39% |
| | | | | | | 105271309 | |
| | −1 | Del | TT | | T | 105271308- | 1.50% |
| | | | | | | 105271309 | |
| | 1 | Ins | T | | TT | 105271309- | 1.05% |
| | | | | | | 105271310 | |
| | −15 | Del | TCATTATTAGGAG | 10550 | T | 105271305- | 0.65% |
| | | | GCT | | | 105271320 | |
| | −4 | Del | TTATT | | T | 105271308- | 0.45% |
| | | | | | | 105271312 | |
| g42 | 1 | Ins | G | | GA | 105271461- | 13.54% |
| | | | | | | 105271462 | |
| | −13 | Com- | GAAGAATTTGCCT | 10551 | AAGAAT | 105271446- | 2.47% |
| | | plex | CTGATAGA | | TT | 105271466 | |
| | −12 | Del | CCTCTGATAGAGC | 10552 | C | 105271456- | 2.44% |
| | | | | | | 105271468 | |
| | −4 | Del | GATAG | | G | 105271461- | 2.39% |
| | | | | | | 105271465 | |
| | −17 | Del | GATAGAGCATGG | 10553 | G | 105271461- | 1.45% |
| | | | GTTCTG | | | 105271478 | |
| g54 | −3 | Del | GTGG | | G | 105270649- | 0.99% |
| | | | | | | 105270652 | |
| | 1 | Ins | G | | GT | 105270652- | 0.91% |
| | | | | | | 105270653 | |
| | −7 | Del | GTGAGGGG | | G | 105270652- | 0.89% |
| | | | | | | 105270659 | |
| | −11 | Del | GGAGGCAGTGGT | 10554 | G | 105270642- | 0.85% |
| | | | | | | 105270653 | |
| | −1 | Del | GG | | G | 105270651- | 0.74% |
| | | | | | | 105270652 | |
| g58 | 1 | Ins | C | | CA | 105271175- | 10.79% |
| | | | | | | 105271176 | |
| | −4 | Del | CAAAC | | C | 105271175- | 4.01% |
| | | | | | | 105271179 | |
| | −1 | Del | CA | | C | 105271175- | 1.91% |
| | | | | | | 105271176 | |
| | −6 | Del | CAAACAC | | C | 105271175- | 1.42% |
| | | | | | | 105271181 | |
| | −8 | Del | ATACAAACA | | A | 105271172- | 1.14% |
| | | | | | | 105271180 | |
| g60 | −3 | Del | AGAA | | A | 105271232- | 0.73% |
| | | | | | | 105271235 | |
| | −7 | Del | AGAACAAA | | A | 105271235- | 0.11% |
| | | | | | | 105271242 | |
| | −8 | Del | AGAAGAACA | | A | 105271232- | 0.10% |
| | | | | | | 105271240 | |
| | −1 | Del | AG | | A | 105271235- | 0.09% |
| | | | | | | 105271236 | |
| | 1 | Ins | A | | AA | 105271235- | 0.07% |
| | | | | | | 105271236 | |

TABLE 23
Typical indel frequencies generated by editing T-cells with
gRNA molecules comprising the targeting domains of CR007626
(g1), CR007710 (g45), CR007633, CR007665, CR007677, CR007703,
CR007671, CR007675, CR007684, CR007691, g59, CR007632 (g10),
CR007648 (g20), CR007709 (g34), g21, g22, g23, g55, CR007627
(g2), g4, g17, g25, g42, g54, g58, and g60 are shown.

| gRNA name | Typical % indel |
|---|---|
| CR007626 (g1) | 58.20% |
| CR007710 (g45) | 59.85% |
| CR007633 | 75.37% |
| CR007665 | 82.05% |
| CR007677 | 79.38% |
| CR007703 | 84.81% |
| CR007671 | 86.77% |
| CR007675 | 84.71% |
| CR007684 | 84.31% |
| CR007691 | 81.79% |
| g59 | 64.84% |
| CR007632 (g10) | 22.62% |
| CR007648 (g20) | 35.21% |
| CR007709 (g34) | 35.59% |
| g21 | 4.74% |
| g22 | 14.32% |
| g23 | 23.62% |
| g55 | 35.59% |
| CR007627 (g2) | 35.51% |
| g4 | 2.12% |
| g17 | 51.26% |
| g25 | 11.69% |
| g42 | 44.30% |
| g54 | 9.51% |
| g58 | 30.32% |
| g60 | 1.75% |

### Methods for On-Target Analysis

### NGS Library Preparation and Sequencing of Amplicons

[1122] PCR amplicons were purified using 1.8× Agencourt AmpureXP beads (Beckman Coulter) following the manufactures recommendations. Amplicons were quantified using the Quant-iT PicoGreen dsDNA assay (Life Technologies) following the manufactures recommendations. Illumina sequencing libraries were generated using the Nextera DNA Library Prep Kit (Illumina) following the manufactures recommendations with the following changes. Tagmentation was performed in a final volume of 5 ul using 5 ng of purified PCR product, 0.15 ul of Nextera tagment enzyme and tagmentation buffer previously described by Wang et al (PMID: 24071908). Tagmented amplicons were then PCR amplified in a final volume of 50 ul using a final concentration of 0.2 mM dNTP (Life Technologies), 0.2 μM Illumina index PCR primers (Integrated DNA Technologies), 1× Phusion DNA polymerase buffer (New England Biolabs) and 1U of Phusion DNA polymerase (New England Biolabs). PCR cycling conditions used were as follows: 72° C. for 3 min, 98° C. for 2 min and 15 cycles of 98° C. for 10 sec, 63° C. for 30 sec, and 72° C. for 3 min. Sequencing libraries were then purified using 1.0× Agencourt AmpureXP beads (Beckman Coulter) following the manufactures recommendations. Sequencing libraries were quantified using the Quant-iT PicoGreen dsDNA assay (Life Technologies) following the manufactures recommendations and pooled equimolar for sequencing. Sequencing libraries were sequenced with 150 base paired-end reads on a MiSeq sequencer following the manufactures recommendations (Illumina). A minimum of a 1000-fold sequencing coverage was generated per amplicon.

### NGS Sequencing Data QC and Variant Analysis

[1123] Using default parameters, the Illumina MiSeq analysis software (MiSeq reporter, version 2.6.2, Illumina) was used to generate amplicon specific FASTQ sequencing data files (Cock et al, Nucleic Acids Res. 2010, 38 (6): 1767-71, PMID: 20015970). FASTQ files were then processed through an internally developed variant analysis pipeline consisting of a series of public domain software packages joined together using a standard Perl script wrapper. The workflow used was divided into five stages.

[1124] Stage 1, PCR primer and on- and off-target sequence QC: The 20 nucleotide gRNA targeting domain sequence plus PAM sequence and target specific PCR primer sequences were aligned to the human genome reference sequence (build GRCh38) using a BLAST search (version 2.2.29+, Altschul et al, J Mol Biol., 1990, 215 (3): 403-10, PMID: 2231712). Sequences with multiple genomic locations were flagged.

[1125] Stage 2, sequencer file decompression: Illumina sequencer generated FASTQ.GZ files were decompressed to FASTQ files using the gzip script (version 1.3.12) and number of reads per file was calculated. Files with no reads were excluded from further analysis.

[1126] Stage 3, sequence read alignment and quality trimming: Sequencing reads in FASTQ files were aligned to the human genome reference sequence (build GRCh38) using the BWA-MEM aligner (version 0.7.4-r385, Li and Durbin, Bioinformatics, 2009, 25 (14): 1754-60, PMID: 19451168) using ‘hard-clipping’ to trim 3′ ends of reads of Illumina sequences and low quality bases. Resulting aligned reads, in the BAM file format (Li et al, Bioinformatics, 2009 25 (16): 2078-9, PMID: 19505943), were converted to FASTQ files using the SAMtools script (version 0.1.19-44428cd, Li et al, Bioinformatics, 2009 25 (16): 2078-9, PMID: 19505943). FASTQ files were then aligned again to the human genome reference sequence (build GRCh38) using the BWA-MEM aligner, this time without ‘hard-clipping’.

[1127] Stage 4, variant (SNP and indel) analysis: BAM files of aligned reads were processed using the VarDict variant caller (version 1.0 ‘Cas9 aware’ modified by developer ZhongWu Lai, Lai et al, Nucleic Acids Res., 2016, 44 (11): e108, PMID: 27060149) with allele frequency detection limit set at >=0.0001 to identify variants (SNPs and indels). The Cas9 aware VarDict caller is based on a public domain package but able to move ambiguous variant calls, generated due to repetitive sequences in the alignment region of the variant events, toward the potential Cas9 nuclease cut site in the gRNA targeting domain sequence located 3 bases 5′ of the PAM sequence. The SAMtools script was used to calculate read coverage per sample amplicon to determine whether the target sites were covered at >1000-fold sequence coverage. Sites with <1000-fold sequence coverage were flagged for rework.

[1128] Stage 5, dbSNP filtering and treated/untreated differential analysis: Variants identified were filtered for known variants (SNPs and indels) found in dbSNP (build 142, Shery et al, Nucleic Acids Res. 2001, 29 (1): 308-11, PMID: 11125122). Variants in the treated samples were further filtered to exclude: 1) variants identified in the unedited mock control samples; 2) variants with a VarDict strand bias of 2:1 (where forward and reverse read counts supporting the reference sequence are balanced but imbalanced for the non-reference variant call); 3) variants located >5 bp either side of the potential Cas9 cut site; 4) single nucleotide variants; 5) Variants not seen in both technical PCR replicates of each treatment group.

[1129] The present disclosure is not to be limited in scope by the exemplified constructs, since the exemplified embodiments are intended to illustrate only certain aspects of the disclosure and any constructs that are functionally equivalent are within the scope of this disclosure. Various modifications of the disclosure in addition to those shown and described herein will become apparent to those skilled in the art from the foregoing description and fall within the scope of the appended claims.

[1130] It is understood that the application of the teachings of the present disclosure to a specific problem or situation will be within the capabilities of one having ordinary skill in the art in light of the teachings contained herein.

[1131] The disclosures of each and every citation in the specification are expressly incorporated herein by reference.

[1132] To the extent there are any discrepancies between a sequence listing and any sequence recited in the specification, the sequence recited in the specification should be considered the correct sequence. Unless otherwise indicated, all genomic locations are according to hg38.

LENGTHY TABLES
The patent application contains a lengthy table section. A copy of the table is available in electronic form from the USPTO web site (https://seqdata.uspto.gov/?pageRequest=docDetail&DocID=US20250109401A1). An electronic copy of the table will also be available from the USPTO upon request and payment of the fee set forth in 37 CFR 1.19(b)(3).

The application's sequence listing, which the Patent Office published only in electronic form, follows.

SEQUENCE LISTING (10563 sequences)

SEQ ID NO: 1 - DNA, 1184 bp, synthetic construct
  misc_feature 1..1184: note = source = /note="Description of Artificial Sequence: Synthetic polynucleotide"
  source 1..1184: mol_type = other DNA
cgtgaggctccggtgcccgtcagtgggcagagcgcacatcgcccacagtccccgagaagttggggggaggggtcggcaattgaaccggtgcctagagaaggtggcgcggggtaaactgggaaagtgatgtcgtgtactggctccgcctttttcccgagggtgggggagaaccgtatataagtgcagtagtcgccgtgaacgttctttttcgcaacgggtttgccgccagaacacaggtaagtgccgtgtgtggttcccgcgggcctggcctctttacgggttatggcccttgcgtgccttgaattacttccacctggctgcagtacgtgattcttgatcccgagcttcgggttggaagtgggtgggagagttcgaggccttgcgcttaaggagccccttcgcctcgtgcttgagttgaggcctggcctgggcgctggggccgccgcgtgcgaatctggtggcaccttcgcgcctgtctcgctgctttcgataagtctctagccatttaaaatttttgatgacctgctgcgacgctttttttctggcaagatagtcttgtaaatgcgggccaagatctgcacactggtatttcggtttttggggccgcgggcggcgacggggcccgtgcgtcccagcgcacatgttcggcgaggcggggcctgcgagcgcggccaccgagaatcggacgggggtagtctcaagctggccggcctgctctggtgcctggcctcgcgccgccgtgtatcgccccgccctgggcggcaaggctggcccggtcggcaccagttgcgtgagcggaaagatggccgcttcccggccctgctgcagggagctcaaaatggaggacgcggcgctcgggagagcgggcgggtgagtcacccacacaaaggaaaagggcctttccgtcctcagccgtcgcttcatgtgactccacggagtaccgggcgccgtccaggcacctcgattagttctcgagcttttggagtacgtcgtctttaggttggggggaggggttttatgcgatggagtttccccacactgagtgggtggagactgaagttaggccagcttggcacttgatgtaattctccttggaatttgccctttttgagtttggatcttggttcattctcaagcctcagacagtggttcaaagtttttttcttccatttcaggtgtcgtga

SEQ ID NO: 2 - protein, 21 aa, synthetic construct
  REGION 1..21: note = source = /note="Description of Artificial Sequence: Synthetic peptide"
MALPVTALLLPLALLLHAARP

SEQ ID NO: 3 - DNA, 63 bp, synthetic construct
  misc_feature 1..63: note = source = /note="Description of Artificial Sequence: Synthetic oligonucleotide"
  source 1..63: mol_type = other DNA
atggccctgcctgtgacagccctgctgctgcctctggctctgctgctgcatgccgctagaccc

SEQ ID NO: 4 - DNA, 63 bp, synthetic construct
  misc_feature 1..63: note = source = /note="Description of Artificial Sequence: Synthetic oligonucleotide"
  source 1..63: mol_type = other DNA
atggccctccctgtcaccgccctgctgcttccgctggctcttctgctccacgccgctcggccc

SEQ ID NO: 5 - protein, 45 aa, synthetic construct
  REGION 1..45: note = source = /note="Description of Artificial Sequence: Synthetic polypeptide"
TTTPAPRPPTPAPTIASQPLSLRPEACRPAAGGAVHTRGLDFACD

SEQ ID NO: 6 - DNA, 135 bp, synthetic construct
  misc_feature 1..135: note = source = /note="Description of Artificial Sequence: Synthetic polynucleotide"
  source 1..135: mol_type = other DNA
accacgacgccagcgccgcgaccaccaacaccggcgcccaccatcgcgtcgcagcccctgtccctgcgcccagaggcgtgccggccagcggcggggggcgcagtgcacacgagggggctggacttcgcctgtgat

SEQ ID NO: 7 - protein, 230 aa, synthetic construct
  REGION 1..230: note = source = /note="Description of Artificial Sequence: Synthetic polypeptide"
ESKYGPPCPPCPAPEFLGGPSVFLFPPKPKDTLMISRTPEVTCVVVDVSQEDPEVQFNWYVDGVEVHNAKTKPREEQFNSTYRVVSVLTVLHQDWLNGKEYKCKVSNKGLPSSIEKTISKAKGQPREPQVYTLPPSQEEMTKNQVSLTCLVKGFYPSDIAVEWESNGQPENNYKTTPPVLDSDGSFFLYSRLTVDKSRWQEGNVFSCSVMHEALHNHYTQKSLSLSLGKM

SEQ ID NO: 8 - DNA, 690 bp, synthetic construct
  misc_feature 1..690: note = source = /note="Description of Artificial Sequence: Synthetic polynucleotide"
  source 1..690: mol_type = other DNA
gagagcaagtacggccctccctgccccccttgccctgcccccgagttcctgggcggacccagcgtgttcctgttcccccccaagcccaaggacaccctgatgatcagccggacccccgaggtgacctgtgtggtggtggacgtgtcccaggaggaccccgaggtccagttcaactggtacgtggacggcgtggaggtgcacaacgccaagaccaagccccgggaggagcagttcaatagcacctaccgggtggtgtccgtgctgaccgtgctgcaccaggactggctgaacggcaaggaatacaagtgtaaggtgtccaacaagggcctgcccagcagcatcgagaaaaccatcagcaaggccaagggccagcctcgggagccccaggtgtacaccctgccccctagccaagaggagatgaccaagaaccaggtgtccctgacctgcctggtgaagggcttctaccccagcgacatcgccgtggagtgggagagcaacggccagcccgagaacaactacaagaccaccccccctgtgctggacagcgacggcagcttcttcctgtacagccggctgaccgtggacaagagccggtggcaggagggcaacgtctttagctgctccgtgatgcacgaggccctgcacaaccactacacccagaagagcctgagcctgtccctgggcaagatg

SEQ ID NO: 9 - protein, 282 aa, synthetic construct
  REGION 1..282: note = source = /note="Description of Artificial Sequence: Synthetic polypeptide"
RWPESPKAQASSVPTAQPQAEGSLAKATTAPATTRNTGRGGEEKKKEKEKEEQEERETKTPECPSHTQPLGVYLLTPAVQDLWLRDKATFTCFVVGSDLKDAHLTWEVAGKVPTGGVEEGLLERHSNGSQSQHSRLTLPRSLWNAGTSVTCTLNHPSLPPQRLMALREPAAQAPVKLSLNLLASSDPPEAASWLLCEVSGFSPPNILLMWLEDQREVNTSGFAPARPPPQPGSTTFWAWSVLRVPAPPSPQPATYTCVVSHEDSRTLLNASRSLEVSYVTDH

SEQ ID NO: 10 - DNA, 847 bp, synthetic construct
  misc_feature 1..847: note = source = /note="Description of Artificial Sequence: Synthetic polynucleotide"
  source 1..847: mol_type = other DNA
aggtggcccgaaagtcccaaggcccaggcatctagtgttcctactgcacagccccaggcagaaggcagcctagccaaagctactactgcacctgccactacgcgcaatactggccgtggcggggaggagaagaaaaaggagaaagagaaagaagaacaggaagagagggagaccaagacccctgaatgtccatcccatacccagccgctgggcgtctatctcttgactcccgcagtacaggacttgtggcttagagataaggccacctttacatgtttcgtcgtgggctctgacctgaaggatgcccatttgacttgggaggttgccggaaaggtacccacagggggggttgaggaagggttgctggagcgccattccaatggctctcagagccagcactcaagactcacccttccgagatccctgtggaacgccgggacctctgtcacatgtactctaaatcatcctagcctgcccccacagcgtctgatggcccttagagagccagccgcccaggcaccagttaagcttagcctgaatctgctcgccagtagtgatcccccagaggccgccagctggctcttatgcgaagtgtccggctttagcccgcccaacatcttgctcatgtggctggaggaccagcgagaagtgaacaccagcggcttcgctccagcccggcccccaccccagccgggttctaccacattctgggcctggagtgtcttaagggtcccagcaccacctagcccccagccagccacatacacctgtgttgtgtcccatgaagatagcaggaccctgctaaatgcttctaggagtctggaggtttcctacgtgactgaccatt

SEQ ID NO: 11 - protein, 10 aa, synthetic construct
  REGION 1..10: note = source = /note="Description of Artificial Sequence: Synthetic peptide"
GGGGSGGGGS

SEQ ID NO: 12 - DNA, 30 bp, synthetic construct
  misc_feature 1..30: note = source = /note="Description of Artificial Sequence: Synthetic oligonucleotide"
  source 1..30: mol_type = other DNA
ggtggcggaggttctggaggtggaggttcc

SEQ ID NO: 13 - protein, 24 aa, synthetic construct
  REGION 1..24: note = source = /note="Description of Artificial Sequence: Synthetic peptide"
IYIWAPLAGTCGVLLLSLVITLYC

SEQ ID NO: 14 - DNA, 72 bp, synthetic construct
  misc_feature 1..72: note = source = /note="Description of Artificial Sequence: Synthetic oligonucleotide"
  source 1..72: mol_type = other DNA
atctacatctgggcgcccttggccgggacttgtggggtccttctcctgtcactggttatcaccctttactgc

SEQ ID NO: 15 - DNA, 72 bp, synthetic construct
  misc_feature 1..72: note = source = /note="Description of Artificial Sequence: Synthetic oligonucleotide"
  source 1..72: mol_type = other DNA
atctacatttgggcccctctggctggtacttgcggggtcctgctgctttcactcgtgatcactctttactgt

SEQ ID NO: 16 - protein, 42 aa, synthetic construct
  REGION 1..42: note = source = /note="Description of Artificial Sequence: Synthetic polypeptide"
KRGRKKLLYIFKQPFMRPVQTTQEEDGCSCRFPEEEEGGCEL

SEQ ID NO: 17 - DNA, 126 bp, synthetic construct
  misc_feature 1..126: note = source = /note="Description of Artificial Sequence: Synthetic polynucleotide"
  source 1..126: mol_type = other DNA
aaacggggcagaaagaaactcctgtatatattcaaacaaccatttatgagaccagtacaaactactcaagaggaagatggctgtagctgccgatttccagaagaagaagaaggaggatgtgaactg

SEQ ID NO: 18 - DNA, 126 bp, synthetic construct
  misc_feature 1..126: note = source = /note="Description of Artificial Sequence: Synthetic polynucleotide"
  source 1..126: mol_type = other DNA
aagcgcggtcggaagaagctgctgtacatctttaagcaacccttcatgaggcctgtgcagactactcaagaggaggacggctgttcatgccggttcccagaggaggaggaaggcggctgcgaactg

SEQ ID NO: 19 - protein, 48 aa, synthetic construct
  REGION 1..48: note = source = /note="Description of Artificial Sequence: Synthetic polypeptide"
QRRKYRSNKGESPVEPAEPCRYSCPREEEGSTIPIQEDYRKPEPACSP

SEQ ID NO: 20 - DNA, 123 bp, synthetic construct
  misc_feature 1..123: note = source = /note="Description of Artificial Sequence: Synthetic polynucleotide"
  source 1..123: mol_type = other DNA
aggagtaagaggagcaggctcctgcacagtgactacatgaacatgactccccgccgccccgggcccacccgcaagcattaccagccctatgccccaccacgcgacttcgcagcctatcgctcc

SEQ ID NO: 21 - protein, 112 aa, synthetic construct
  REGION 1..112: note = source = /note="Description of Artificial Sequence: Synthetic polypeptide"
RVKFSRSADAPAYKQGQNQLYNELNLGRREEYDVLDKRRGRDPEMGGKPRRKNPQEGLYNELQKDKMAEAYSEIGMKGERRRGKGHDGLYQGLSTATKDTYDALHMQALPPR

SEQ ID NO: 22 - DNA, 336 bp, synthetic construct
  misc_feature 1..336: note = source = /note="Description of Artificial Sequence: Synthetic polynucleotide"
  source 1..336: mol_type = other DNA
agagtgaagttcagcaggagcgcagacgcccccgcgtacaagcagggccagaaccagctctataacgagctcaatctaggacgaagagaggagtacgatgttttggacaagagacgtggccgggaccctgagatggggggaaagccgagaaggaagaaccctcaggaaggcctgtacaatgaactgcagaaagataagatggcggaggcctacagtgagattgggatgaaaggcgagcgccggaggggcaaggggcacgatggcctttaccagggtctcagtacagccaccaaggacacctacgacgcccttcacatgcaggccctgccccctcgc

SEQ ID NO: 23 - DNA, 336 bp, synthetic construct
  misc_feature 1..336: note = source = /note="Description of Artificial Sequence: Synthetic polynucleotide"
  source 1..336: mol_type = other DNA
cgcgtgaaattcagccgcagcgcagatgctccagcctacaagcaggggcagaaccagctctacaacgaactcaatcttggtcggagagaggagtacgacgtgctggacaagcggagaggacgggacccagaaatgggcgggaagccgcgcagaaagaatccccaagagggcctgtacaacgagctccaaaaggataagatggcagaagcctatagcgagattggtatgaaaggggaacgcagaagaggcaaaggccacgacggactgtaccagggactcagcaccgccaccaaggacacctatgacgctcttcacatgcaggccctgccgcctcgg

SEQ ID NO: 24 - protein, 112 aa, synthetic construct
  REGION 1..112: note = source = /note="Description of Artificial Sequence: Synthetic polypeptide"
RVKFSRSADAPAYQQGQNQLYNELNLGRREEYDVLDKRRGRDPEMGGKPRRKNPQEGLYNELQKDKMAEAYSEIGMKGERRRGKGHDGLYQGLSTATKDTYDALHMQALPPR

SEQ ID NO: 25 - DNA, 336 bp, synthetic construct
  misc_feature 1..336: note = source = /note="Description of Artificial Sequence: Synthetic polynucleotide"
  source 1..336: mol_type = other DNA
agagtgaagttcagcaggagcgcagacgcccccgcgtaccagcagggccagaaccagctctataacgagctcaatctaggacgaagagaggagtacgatgttttggacaagagacgtggccgggaccctgagatggggggaaagccgagaaggaagaaccctcaggaaggcctgtacaatgaactgcagaaagataagatggcggaggcctacagtgagattgggatgaaaggcgagcgccggaggggcaaggggcacgatggcctttaccagggtctcagtacagccaccaaggacacctacgacgcccttcacatgcaggccctgccccctcgc

SEQ ID NO: 26 - protein, 5 aa, synthetic construct
  REGION 1..5: note = source = /note="Description of Artificial Sequence: Synthetic peptide"
  REGION 1..5: note = source = /note="See specification as filed for detailed description of substitutions and preferred embodiments"
GGGGS

SEQ ID NO: 27 - skipped

SEQ ID NO: 28 - protein, 150 aa, synthetic construct [sequence omitted]

SEQ ID NO: 29 - DNA, 450 bp, synthetic construct
  misc_feature 1..450: note = source = /note="Description of Artificial Sequence: Synthetic polynucleotide"
  source 1..450: mol_type = other DNA
cccggatggtttctggactctccggatcgcccgtggaatcccccaaccttctcaccggcactcttggttgtgactgagggcgataatgcgaccttcacgtgctcgttctccaacacctccgaatcattcgtgctgaactggtaccgcatgagcccgtcaaaccagaccgacaagctcgccgcgtttccggaagatcggtcgcaaccgggacaggattgtcggttccgcgtgactcaactgccgaatggcagagacttccacatgagcgtggtccgcgctaggcgaaacgactccgggacctacctgtgcggagccatctcgctggcgcctaaggcccaaatcaaagagagcttgagggccgaactgagagtgaccgagcgcagagctgaggtgccaactgcacatccatccccatcgcctcggcctgcggggcagtttcagaccctggtc

SEQ ID NO: 30 - protein, 394 aa, synthetic construct
  REGION 1..394: note = source = /note="Description of Artificial Sequence: Synthetic polypeptide"
MALPVTALLLPLALLLHAARPPGWFLDSPDRPWNPPTFSPALLVVTEGDNATFTCSFSNTSESFVLNWYRMSPSNQTDKLAAFPEDRSQPGQDCRFRVTQLPNGRDFHMSVVRARRNDSGTYLCGAISLAPKAQIKESLRAELRVTERRAEVPTAHPSPSPRPAGQFQTLVTTTPAPRPPTPAPTIASQPLSLRPEACRPAAGGAVHTRGLDFACDIYIWAPLAGTCGVLLLSLVITLYCKRGRKKLLYIFKQPFMRPVQTTQEEDGCSCRFPEEEEGGCELRVKFSRSADAPAYKQGQNQLYNELNLGRREEYDVLDKRRGRDPEMGGKPRRKNPQEGLYNELQKDKMAEAYSEIGMKGERRRGKGHDGLYQGLSTATKDTYDALHMQALPPR

SEQ ID NO: 31 - DNA, 1182 bp, synthetic construct
  misc_feature 1..1182: note = source = /note="Description of Artificial Sequence: Synthetic polynucleotide"
  source 1..1182: mol_type = other DNA
atggccctccctgtcactgccctgcttctccccctcgcactcctgctccacgccgctagaccacccggatggtttctggactctccggatcgcccgtggaatcccccaaccttctcaccggcactcttggttgtgactgagggcgataatgcgaccttcacgtgctcgttctccaacacctccgaatcattcgtgctgaactggtaccgcatgagcccgtcaaaccagaccgacaagctcgccgcgtttccggaagatcggtcgcaaccgggacaggattgtcggttccgcgtgactcaactgccgaatggcagagacttccacatgagcgtggtccgcgctaggcgaaacgactccgggacctacctgtgcggagccatctcgctggcgcctaaggcccaaatcaaagagagcttgagggccgaactgagagtgaccgagcgcagagctgaggtgccaactgcacatccatccccatcgcctcggcctgcggggcagtttcagaccctggtcacgaccactccggcgccgcgcccaccgactccggccccaactatcgcgagccagcccctgtcgctgaggccggaagcatgccgccctgccgccggaggtgctgtgcatacccggggattggacttcgcatgcgacatctacatttgggctcctctcgccggaacttgtggcgtgctccttctgtccctggtcatcaccctgtactgcaagcggggtcggaaaaagcttctgtacattttcaagcagcccttcatgaggcccgtgcaaaccacccaggaggaggacggttgctcctgccggttccccgaagaggaagaaggaggttgcgagctgcgcgtgaagttctcccggagcgccgacgcccccgcctataagcagggccagaaccagctgtacaacgaactgaacctgggacggcgggaagagtacgatgtgctggacaagcggcgcggccgggaccccgaaatgggcgggaagcctagaagaaagaaccctcaggaaggcctgtataacgagctgcagaaggacaagatggccgaggcctactccgaaattgggatgaagggagagcggcggaggggaaaggggcacgacggcctgtaccaaggactgtccaccgccaccaaggacacatacgatgccctgcacatgcaggcccttccccctcgc

SEQ ID NO: 32 - protein, 40 aa, synthetic construct
  VARIANT 1..40: note = MISC_FEATURE - /note="This sequence may encompass 1-10 'Gly Gly Gly Ser' repeating units"
  REGION 1..40: note = source = /note="Description of Artificial Sequence: Synthetic polypeptide"
  REGION 1..40: note = source = /note="See specification as filed for detailed description of substitutions and preferred embodiments"
GGGSGGGSGGGSGGGSGGGSGGGSGGGSGGGSGGGSGGGS

SEQ ID NO: 33 - protein, 50 aa, synthetic construct
  REGION 1..50: note = source = /note="Description of Artificial Sequence: Synthetic polypeptide"
GGGGSGGGGSGGGGSGGGGSGGGGSGGGGSGGGGSGGGGSGGGGSGGGGS

SEQ ID NO: 34 - protein, 20 aa, synthetic construct
  REGION 1..20: note = source = /note="Description of Artificial Sequence: Synthetic peptide"
GGGGSGGGGSGGGGSGGGGS

SEQ ID NO: 35 - protein, 15 aa, synthetic construct
  REGION 1..15: note = source = /note="Description of Artificial Sequence: Synthetic peptide"
GGGGSGGGGSGGGGS

SEQ ID NO: 36 - protein, 4 aa, synthetic construct
  REGION 1..4: note = source = /note="Description of Artificial Sequence: Synthetic peptide"
GGGS

SEQ ID NO: 37 - protein, 373 aa, synthetic construct
  REGION 1..373: note = source = /note="Description of Artificial Sequence: Synthetic polypeptide"
PGWFLDSPDRPWNPPTFSPALLVVTEGDNATFTCSFSNTSESFVLNWYRMSPSNQTDKLAAFPEDRSQPGQDCRFRVTQLPNGRDFHMSVVRARRNDSGTYLCGAISLAPKAQIKESLRAELRVTERRAEVPTAHPSPSPRPAGQFQTLVTTTPAPRPPTPAPTIASQPLSLRPEACRPAAGGAVHTRGLDFACDIYIWAPLAGTCGVLLLSLVITLYCKRGRKKLLYIFKQPFMRPVQTTQEEDGCSCRFPEEEEGGCELRVKFSRSADAPAYKQGQNQLYNELNLGRREEYDVLDKRRGRDPEMGGKPRRKNPQEGLYNELQKDKMAEAYSEIGMKGERRRGKGHDGLYQGLSTATKDTYDALHMQALPPR

SEQ ID NO: 38 - protein, 18 aa, synthetic construct
  REGION 1..18: note = source = /note="Description of Artificial Sequence: Synthetic peptide"
GSTSGSGKPGSGEGSTKG

SEQ ID NO: 39-49 - skipped (11 entries)

SEQ ID NO: 50 - RNA, 12 nt, synthetic construct
  misc_feature 1..12: note = source = /note="Description of Artificial Sequence: Synthetic oligonucleotide"
  source 1..12: mol_type = other RNA
gttttagagcta

SEQ ID NO: 51 - RNA, 12 nt, synthetic construct
  misc_feature 1..12: note = source = /note="Description of Artificial Sequence: Synthetic oligonucleotide"
  source 1..12: mol_type = other RNA
gtttaagagcta

SEQ ID NO: 52 - skipped

SEQ ID NO: 53 - RNA, 60 nt, synthetic construct
  misc_feature 1..60: note = source = /note="Description of Artificial Sequence: Synthetic oligonucleotide"
  source 1..60: mol_type = other RNA
tagcaagttaaaataaggctagtccgttatcaacttgaaaaagtggcaccgagtcggtgc

SEQ ID NO: 54 - RNA, 60 nt, synthetic construct
  misc_feature 1..60: note = source = /note="Description of Artificial Sequence: Synthetic oligonucleotide"
  source 1..60: mol_type = other RNA
tagcaagtttaaataaggctagtccgttatcaacttgaaaaagtggcaccgagtcggtgc

SEQ ID NO: 55-57 - skipped (3 entries)

SEQ ID NO: 58 - RNA, 10 nt, synthetic construct
  misc_difference 1..10: note = misc_feature - /note="This sequence may encompass 1-10 nucleotides"
  misc_feature 1..10: note = source = /note="Description of Artificial Sequence: Synthetic oligonucleotide"
  source 1..10: mol_type = other RNA
tttttttttt

SEQ ID NO: 59 - DNA, 10 bp, synthetic construct
  misc_difference 1..10: note = misc_feature - /note="This sequence may encompass 1-10 nucleotides"
  misc_feature 1..10: note = source = /note="Description of Artificial Sequence: Synthetic oligonucleotide"
  source 1..10: mol_type = other DNA
aaaaaaaaaa

SEQ ID NO: 60 - skipped

SEQ ID NO: 61 - RNA, 13 nt, synthetic construct
  misc_feature 1..13: note = source = /note="Description of Artificial Sequence: Synthetic oligonucleotide"
  source 1..13: mol_type = other RNA
tagcaagttaaaa

SEQ ID NO: 62 - RNA, 13 nt, synthetic construct
  misc_feature 1..13: note = source = /note="Description of Artificial Sequence: Synthetic oligonucleotide"
  source 1..13: mol_type = other RNA
tagcaagtttaaa

SEQ ID NO: 63 - RNA, 47 nt, synthetic construct
  misc_feature 1..47: note = source = /note="Description of Artificial Sequence: Synthetic oligonucleotide"
  source 1..47: mol_type = other RNA
taaggctagtccgttatcaacttgaaaaagtggcaccgagtcggtgc

SEQ ID NO: 64 - RNA, 51 nt, synthetic construct
  misc_feature 1..51: note = source = /note="Description of Artificial Sequence: Synthetic oligonucleotide"
  source 1..51: mol_type = other RNA
taaggctagtccgttatcaacttgaaaaagtggcaccgagtcggtgctttt

SEQ ID NO: 65 - RNA, 74 nt, synthetic construct
  misc_feature 1..74: note = source = /note="Description of Artificial Sequence: Synthetic oligonucleotide"
  source 1..74: mol_type = other RNA
aacagcatagcaagttaaaataaggctagtccgttatcaacttgaaaaagtggcaccgagtcggtgcttttttt

SEQ ID NO: 66 - RNA, 36 nt, synthetic construct
  misc_difference 1..20: note = modified_base - a, c, u, g, unknown or other
  misc_feature 1..36: note = source = /note="Description of Artificial Sequence: Synthetic oligonucleotide"
  misc_feature 1..36: note = source = /note="See specification as filed for detailed description of substitutions and preferred embodiments"
  source 1..36: mol_type = other RNA
nnnnnnnnnnnnnnnnnnnngttttagagctatgct

SEQ ID NO: 67 - RNA, 74 nt, synthetic construct; identical to SEQ ID NO: 65
  misc_feature 1..74: note = source = /note="Description of Artificial Sequence: Synthetic oligonucleotide"
  source 1..74: mol_type = other RNA

SEQ ID NO: 68 - RNA, 42 nt, synthetic construct
  misc_difference 1..20: note = modified_base - a, c, u, g, unknown or other
  misc_feature 1..42: note = source = /note="Description of Artificial Sequence: Synthetic oligonucleotide"
  misc_feature 1..42: note = source = /note="See specification as filed for detailed description of substitutions and preferred embodiments"
  source 1..42: mol_type = other RNA
nnnnnnnnnnnnnnnnnnnngttttagagctatgctgttttg

SEQ ID NO: 69 - RNA, 100 nt, synthetic construct
  misc_difference 1..20: note = modified_base - a, c, u, g, unknown or other
  misc_feature 1..100: note = source = /note="Description of Artificial Sequence: Synthetic polynucleotide"
  misc_feature 1..100: note = source = /note="See specification as filed for detailed description of substitutions and preferred embodiments"
  source 1..100: mol_type = other RNA
nnnnnnnnnnnnnnnnnnnngttttagagctagaaatagcaagttaaaataaggctagtccgttatcaacttgaaaaagtggcaccgagtcggtgctttt

SEQ ID NO: 70 - RNA, 100 nt, synthetic construct; identical to SEQ ID NO: 69
  misc_difference 1..20: note = modified_base - a, c, u, g, unknown or other
  misc_feature 1..100: note = source = /note="Description of Artificial Sequence: Synthetic polynucleotide"
  misc_feature 1..100: note = source = /note="See specification as filed for detailed description of substitutions and preferred embodiments"
  source 1..100: mol_type = other RNA

SEQ ID NO: 71 - RNA, 76 nt, synthetic construct
  misc_feature 1..76: note = source = /note="Description of Artificial Sequence: Synthetic oligonucleotide"
  source 1..76: mol_type = other RNA
gttttagagctagaaatagcaagttaaaataaggctagtccgttatcaacttgaaaaagtggcaccgagtcggtgc

SEQ ID NO: 72 - RNA, 76 nt, synthetic construct
  misc_feature 1..76: note = source = /note="Description of Artificial Sequence: Synthetic oligonucleotide"
  source 1..76: mol_type = other RNA
gtttaagagctagaaatagcaagtttaaataaggctagtccgttatcaacttgaaaaagtggcaccgagtcggtgc

SEQ ID NO: 73 - RNA, 86 nt, synthetic construct
  misc_feature 1..86: note = source = /note="Description of Artificial Sequence: Synthetic oligonucleotide"
  source 1..86: mol_type = other RNA
gttttagagctatgctggaaacagcatagcaagttaaaataaggctagtccgttatcaacttgaaaaagtggcaccgagtcggtgc

SEQ ID NO: 74 - RNA, 86 nt, synthetic construct
  misc_feature 1..86: note = source = /note="Description of Artificial Sequence: Synthetic oligonucleotide"
  source 1..86: mol_type = other RNA
gtttaagagctatgctggaaacagcatagcaagtttaaataaggctagtccgttatcaacttgaaaaagtggcaccgagtcggtgc

SEQ ID NO: 75 - RNA, 80 nt, synthetic construct
  misc_feature 1..80: note = source = /note="Description of Artificial Sequence: Synthetic oligonucleotide"
  source 1..80: mol_type = other RNA
gttttagagctagaaatagcaagttaaaataaggctagtccgttatcaacttgaaaaagtggcaccgagtcggtgctttt

SEQ ID NO: 76 - RNA, 90 nt, synthetic construct
  misc_feature 1..90: note = source = /note="Description of Artificial Sequence: Synthetic oligonucleotide"
  source 1..90: mol_type = other RNA
gtttaagagctatgctggaaacagcatagcaagtttaaataaggctagtccgttatcaacttgaaaaagtggcaccgagtcggtgctttt

SEQ ID NO: 77 - RNA, 17 nt, synthetic construct
  misc_feature 1..17: note = source = /note="Description of Artificial Sequence: Synthetic oligonucleotide"
  source 1..17: mol_type = other RNA
gttttagagctatgctg

SEQ ID NO: 78 - RNA, 17 nt, synthetic construct
  misc_feature 1..17: note = source = /note="Description of Artificial Sequence: Synthetic oligonucleotide"
  source 1..17: mol_type = other RNA
gtttaagagctatgctg

SEQ ID NO: 79 - RNA, 22 nt, synthetic construct
  misc_feature 1..22: note = source = /note="Description of Artificial Sequence: Synthetic oligonucleotide"
  source 1..22: mol_type = other RNA
gttttagagctatgctgttttg

SEQ ID NO: 80 - RNA, 22 nt, synthetic construct
  misc_feature 1..22: note = source = /note="Description of Artificial Sequence: Synthetic oligonucleotide"
  source 1..22: mol_type = other RNA
gtttaagagctatgctgttttg

SEQ ID NO: 81 - RNA, 16 nt, synthetic construct
  misc_feature 1..16: note = source = /note="Description of Artificial Sequence: Synthetic oligonucleotide"
  source 1..16: mol_type = other RNA
gttttagagctatgct

SEQ ID NO: 82 - RNA, 65 nt, synthetic construct
  misc_feature 1..65: note = source = /note="Description of Artificial Sequence: Synthetic oligonucleotide"
  source 1..65: mol_type = other RNA
cagcatagcaagttaaaataaggctagtccgttatcaacttgaaaaagtggcaccgagtcggtgc

SEQ ID NO: 83 - RNA, 65 nt, synthetic construct
  misc_feature 1..65: note = source = /note="Description of Artificial Sequence: Synthetic oligonucleotide"
  source 1..65: mol_type = other RNA
cagcatagcaagtttaaataaggctagtccgttatcaacttgaaaaagtggcaccgagtcggtgc

SEQ ID NO: 84 - RNA, 74 nt, synthetic construct
  misc_feature 1..74: note = source = /note="Description of Artificial Sequence: Synthetic oligonucleotide"
  source 1..74: mol_type = other RNA
aacagcatagcaagtttaaataaggctagtccgttatcaacttgaaaaagtggcaccgagtcggtgcttttttt

SEQ ID NO: 85 - RNA, 67 nt, synthetic construct
  misc_feature 1..67: note = source = /note="Description of Artificial Sequence: Synthetic oligonucleotide"
  source 1..67: mol_type = other RNA
agcatagcaagttaaaataaggctagtccgttatcaacttgaaaaagtggcaccgagtcggtgcttt

SEQ ID NO: 86 - RNA, 85 nt, synthetic construct
  misc_feature 1..85: note = source = /note="Description of Artificial Sequence: Synthetic oligonucleotide"
  source 1..85: mol_type = other RNA
gttggaaccattcaaaacagcatagcaagttaaaataaggctagtccgttatcaacttgaaaaagtggcaccgagtcggtgcttt

SEQ ID NO: 87 - RNA, 67 nt, synthetic construct
  misc_feature 1..67: note = source = /note="Description of Artificial Sequence: Synthetic oligonucleotide"
  source 1..67: mol_type = other RNA
aacagcatagcaagttaaaataaggctagtccgttatcaacttgaaaaagtggcaccgagtcggtgc

SEQ ID NO: 88-89 - skipped (2 entries)

SEQ ID NO: 90 - protein, 1368 aa, Streptococcus pyogenes [sequence omitted]

SEQ ID NO: 91 - protein, 7 aa, Simian virus 40
PKKKRKV

SEQ ID NO: 92 - protein, 16 aa, unidentified
  REGION 1..16: note = source = /note="Description of Unknown: Nucleoplasmin bipartite NLS sequence"
KRPAATKKAGQAKKKK

SEQ ID NO: 93 - protein, 9 aa, unidentified
  REGION 1..9: note = source = /note="Description of Unknown: C-myc NLS sequence"
PAAKRVKLD

SEQ ID NO: 94 - protein, 11 aa, unidentified
  REGION 1..11: note = source = /note="Description of Unknown: C-myc NLS sequence"
RQRRNELKRSP

SEQ ID NO: 95 - protein, 38 aa, Homo sapiens
NQSSNFGPMKGGNFGGRSSGPYGGGGQYFAKPRNQGGY

SEQ ID NO: 96 - protein, 42 aa, unidentified
  REGION 1..42: note = source = /note="Description of Unknown: IBB domain from importin-alpha sequence"
RMRIZFKNKGKDTAELRRRRVEVSVELRKAKKDEQILKRRNV

SEQ ID NO: 97 - protein, 8 aa, unidentified
  REGION 1..8: note = source = /note="Description of Unknown: Myoma T protein sequence"
VSRKRPRP

SEQ ID NO: 98 - protein, 8 aa, unidentified
  REGION 1..8: note = source = /note="Description of Unknown: Myoma T protein sequence"
PPKKARED

SEQ ID NO: 99 - protein, 8 aa, Homo sapiens
PQPKKKPL

SEQ ID NO: 100 - protein, 12 aa, Mus musculus
SALIKKKKKMAP

SEQ ID NO: 101 - protein, 5 aa, Influenza virus
DRLRR

SEQ ID NO: 102 - protein, 7 aa, Influenza virus
PKQKKRK

SEQ ID NO: 103 - protein, 10 aa, Hepatitis delta virus
RKLKKKIKKL

SEQ ID NO: 104 - protein, 10 aa, Mus musculus
REKKKFLKRR

SEQ ID NO: 105 - protein, 20 aa, Homo sapiens
KRKGDEVDGVDEVAKKKSKK

SEQ ID NO: 106 - protein, 17 aa, Homo sapiens
RKCLQAGMNLEARKTKK

SEQ ID NO: 107 - protein, 10 aa, synthetic construct
  VARIANT 1..10: note = MISC_FEATURE - /note="This sequence may encompass 3-10 residues"
  REGION 1..10: note = source = /note="Description of Artificial Sequence: Synthetic His tag"
  REGION 1..10: note = source = /note="See specification as filed for detailed description of substitutions and preferred embodiments"
HHHHHHHHHH

SEQ ID NO: 108 - protein, 6 aa, synthetic construct
  REGION 1..6: note = source = /note="Description of Artificial Sequence: Synthetic 6xHis tag"
HHHHHH

SEQ ID NO: 109 - protein, 8 aa, synthetic construct
  REGION 1..8: note = source = /note="Description of Artificial Sequence: Synthetic 8xHis tag"
HHHHHHHH

SEQ ID NO: 110 - protein, 7 aa, Tobacco etch virus
ENLYFQG

SEQ ID NO: 111 - protein, 1393 aa, synthetic construct
  REGION 1..1393: note = source = /note="Description of Artificial Sequence: Synthetic polypeptide"
MAPKKKRKVDKKYSIGLDIGTNSVGWAVITDEYKVPSKKFKVLGNTDRHSIKKNLIGALLFDSGETAEATRLKRTARRRYTRRKNRICYLQEIFSNEMAKVDDSFFHRLEESFLVEEDKKHERHPIFGNIVDEVAYHEKYPTIYHLRKKLVDSTDKADLRLIYLALAHMIKFRGHFLIEGDLNPDNSDVDKLFIQLVQTYNQLFEENPINASGVDAKAILSARLSKSRRLENLIAQLPGEKKNGLFGNLIALSLGLTPNFKSNFDLAEDAKLQLSKDTYDDDLDNLLAQIGDQYADLFLAAKNLSDAILLSDILRVNTEITKAPLSASMIKRYDEHHQDLTLLKALVRQQLPEKYKEIFFDQSKNGYAGYIDGGASQEEFYKFIKPILEKMDGTEELLVKLNREDLLRKQRTFDNGSIPHQIHLGELHAILRRQEDFYPFLKDNREKIEKILTFRIPYYVGPLARGNSRFAWMTRKSEETITPWNFEEVVDKGASAQSFIERMTNFDKNLPNEKVLPKHSLLYEYFTVYNELTKVKYVTEGMRKPAFLSGEQKKAIVDLLFKTNRKVTVKQLKEDYFKKIECFDSVEISGVEDRFNASLGTYHDLLKIIKDKDFLDNEENEDILEDIVLTLTLFEDREMIEERLKTYAHLFDDKVMKQLKRRRYTGWGRLSRKLINGIRDKQSGKTILDFLKSDGFANRNFMQLIHDDSLTFKEDIQKAQVSGQGDSLHEHIANLAGSPAIKKGILQTVKVVDELVKVMGRHKPENIVIEMARENQTTQKGQKNSRERMKRIEEGIKELGSQILKEHPVENTQLQNEKLYLYYLQNGRDMYVDQELDINRLSDYDVDHIVPQSFLKDDSIDNKVLTRSDKNRGKSDNVPSEEVVKKMKNYWRQLLNAKLITQRKFDNLTKAERGGLSELDKAGFIKRQLVETRQITKHVAQILDSRMNTKYDENDKLIREVKVITLKSKLVSDFRKDFQFYKVREINNYHHAHDAYLNAVVGTALIKKYPKLESEFVYGDYKVYDVRKMIAKSEQEIGKATAKYFFYSNIMNFFKTEITLANGEIRKRPLIETNGETGEIVWDKGRDFATVRKVLSMPQVNIVKKTEVQTGGFSKESILPKRNSDKLIARKKDWDPKKYGGFDSPTVAYSVLVVAKVEKGKSKKLKSVKELLGITIMERSSFEKNPIDFLEAKGYKEVKKDLIIKLPKYSLFELENGRKRMLASAGELQKGNELALPSKYVNFLYLASHYEKLKGSPEDNEQKQLFVEQHKHYLDEIIEQISEFSKRVILADANLDKVLSAYNKHRDKPIREQAENIIHLFTLTNLGAPAAFKYFDTTIDRKRYTSTKEVLDATLIHQSITGLYETRIDLSQLGGDSRADPKKKRKVHHHHHH

SEQ ID NO: 112 - protein, 1393 aa, synthetic construct
  REGION 1..1393: note = source = /note="Description of Artificial Sequence: Synthetic polypeptide"
MAPKKKRKVDKKYSIGLDIGTNSVGWAVITDEYKVPSKKFKVLGNTDRHSIKKNLIGALLFDSGETAEATRLKRTARRRYTRRKNRILYLQEIFSNEMAKVDDSFFHRLEESFLVEEDKKHERHPIFGNIVDEVAYHEKYPTIYHLRKKLVDSTDKADLRLIYLALAHMIKFRGHFLIEGDLNPDNSDVDKLFIQLVQTYNQLFEENPINASGVDAKAILSARLSKSRRLENLIAQLPGEKKNGLFGNLIALSLGLTPNFKSNFDLAEDAKLQLSKDTYDDDLDNLLAQIGDQYADLFLAAKNLSDAILLSDILRVNTEITKAPLSASMIKRYDEHHQDLTLLKALVRQQLPEKYKEIFFDQSKNGYAGYIDGGASQEEFYKFIKPILEKMDGTEELLVKLNREDLLRKQRTFDNGSIPHQIHLGELHAILRRQEDFYPFLKDNREKIEKILTFRIPYYVGPLARGNSRFAWMTRKSEETITPWNFEEVVDKGASAQSFIERMTNFDKNLPNEKVLPKHSLLYEYFTVYNELTKVKYVTEGMRKPAFLSGEQKKAIVDLLFKTNRKVTVKQLKEDYFKKIEEFDSVEISGVEDRFNASLGTYHDLLKIIKDKDFLDNEENEDILEDIVLTLTLFEDREMIEERLKTYAHLFDDKVMKQLKRRRYTGWGRLSRKLINGIRDKQSGKTILDFLKSDGFANRNFMQLIHDDSLTFKEDIQKAQVSGQGDSLHEHIANLAGSPAIKKGILQTVKVVDELVKVMGRHKPENIVIEMARENQTTQKGQKNSRERMKRIEEGIKELGSQILKEHPVENTQLQNEKLYLYYLQNGRDMYVDQELDINRLSDYDVDHIVPQSFLKDDSIDNKVLTRSDKNRGKSDNVPSEEVVKKMKNYWRQLLNAKLITQRKFDNLTKAERGGLSELDKAGFIKRQLVETRQITKHVAQILDSRMNTKYDENDKLIREVKVITLKSKLVSDFRKDFQFYKVREINNYHHAHDAYLNAVVGTALIKKYPKLESEFVYGDYKVYDVRKMIAKSEQEIGKATAKYFFYSNIMNFFKTEITLANGEIRKRPLIETNGETGEIVWDKGRDFATVRKVLSMPQVNIVKKTEVQTGGFSKESILPKRNSDKLIARKKDWDPKKYGGFDSPTVAYSVLVVAKVEKGKSKKLKSVKELLGITIMERSSFEKNPIDFLEAKGYKEVKKDLIIKLPKYSLFELENGRKRMLASAGELQKGNELALPSKYVNFLYLASHYEKLKGSPEDNEQKQLFVEQHKHYLDEIIEQISEFSKRVILADANLDKVLSAYNKHRDKPIREQAENIIHLFTLTNLGAPAAFKYFDTTIDRKRYTSTKEVLDATLIHQSITGLYETRIDLSQLGGDSRADPKKKRKVHHHHHH

SEQ ID NO: 113 - protein, 1399 aa, synthetic construct
  REGION 1..1399: note = source = /note="Description of Artificial Sequence: Synthetic polypeptide"
MGSSHHHHHHHHENLYFQGSMDKKYSIGLDIGTNSVGWAVITDEYKVPSKKFKVLGNTDRHSIKKNLIGALLFDSGETAEATRLKRTARRRYTRRKNRICYLQEIFSNEMAKVDDSFFHRLEESFLVEEDKKHERHPIFGNIVDEVAYHEKYPTIYHLRKKLVDSTDKADLRLIYLALAHMIKFRGHFLIEGDLNPDNSDVDKLFIQLVQTYNQLFEENPINASGVDAKAILSARLSKSRRLENLIAQLPGEKKNGLFGNLIALSLGLTPNFKSNFDLAEDAKLQLSKDTYDDDLDNLLAQIGDQYADLFLAAKNLSDAILLSDILRVNTEITKAPLSASMIKRYDEHHQDLTLLKALVRQQLPEKYKEIFFDQSKNGYAGYIDGGASQEEFYKFIKPILEKMDGTEELLVKLNREDLLRKQRTFDNGSIPHQIHLGELHAILRRQEDFYPFLKDNREKIEKILTFRIPYYVGPLARGNSRFAWMTRKSEETITPWNFEEVVDKGASAQSFIERMTNFDKNLPNEKVLPKHSLLYEYFTVYNELTKVKYVTEGMRKPAFLSGEQKKAIVDLLFKTNRKVTVKQLKEDYFKKIECFDSVEISGVEDRFNASLGTYHDLLKIIKDKDFLDNEENEDILEDIVLTLTLFEDREMIEERLKTYAHLFDDKVMKQLKRRRYTGWGRLSRKLINGIRDKQSGKTILDFLKSDGFANRNFMQLIHDDSLTFKEDIQKAQVSGQGDSLHEHIANLAGSPAIKKGILQTVKVVDELVKVMGRHKPENIVIEMARENQTTQKGQKNSRERMKRIEEGIKELGSQILKEHPVENTQLQNEKLYLYYLQNGRDMYVDQELDINRLSDYDVDHIVPQSFLKDDSIDNKVLTRSDKNRGKSDNVPSEEVVKKMKNYWRQLLNAKLITQRKFDNLTKAERGGLSELDKAGFIKRQLVETRQITKHVAQILDSRMNTKYDENDKLIREVKVITLKSKLVSDFRKDFQFYKVREINNYHHAHDAYLNAVVGTALIKKYPKLESEFVYGDYKVYDVRKMIAKSEQEIGKATAKYFFYSNIMNFFKTEITLANGEIRKRPLIETNGETGEIVWDKGRDFATVRKVLSMPQVNIVKKTEVQTGGFSKESILPKRNSDKLIARKKDWDPKKYGGFDSPTVAYSVLVVAKVEKGKSKKLKSVKELLGITIMERSSFEKNPIDFLEAKGYKEVKKDLIIKLPKYSLFELENGRKRMLASAGELQKGNELALPSKYVNFLYLASHYEKLKGSPEDNEQKQLFVEQHKHYLDEIIEQISEFSKRVILADANLDKVLSAYNKHRDKPIREQAENIIHLFTLTNLGAPAAFKYFDTTIDRKRYTSTKEVLDATLIHQSITGLYETRIDLSQLGGDGGGSPKKKRKV

SEQ ID NO: 114 - protein, 1396 aa, synthetic construct
  REGION 1..1396: note = source = /note="Description of Artificial Sequence: Synthetic polypeptide"
MAHHHHHHGGSPKKKRKVDKKYSIGLDIGTNSVGWAVITDEYKVPSKKFKVLGNTDRHSIKKNLIGALLFDSGETAEATRLKRTARRRYTRRKNRICYLQEIFSNEMAKVDDSFFHRLEESFLVEEDKKHERHPIFGNIVDEVAYHEKYPTIYHLRKKLVDSTDKADLRLIYLALAHMIKFRGHFLIEGDLNPDNSDVDKLFIQLVQTYNQLFEENPINASGVDAKAILSARLSKSRRLENLIAQLPGEKKNGLFGNLIALSLGLTPNFKSNFDLAEDAKLQLSKDTYDDDLDNLLAQIGDQYADLFLAAKNLSDAILLSDILRVNTEITKAPLSASMIKRYDEHHQDLTLLKALVRQQLPEKYKEIFFDQSKNGYAGYIDGGASQEEFYKFIKPILEKMDGTEELLVKLNREDLLRKQRTFDNGSIPHQIHLGELHAILRRQEDFYPFLKDNREKIEKILTFRIPYYVGPLARGNSRFAWMTRKSEETITPWNFEEVVDKGASAQSFIERMTNFDKNLPNEKVLPKHSLLYEYFTVYNELTKVKYVTEGMRKPAFLSGEQKKAIVDLLFKTNRKVTVKQLKEDYFKKIECFDSVEISGVEDRFNASLGTYHDLLKIIKDKDFLDNEENEDILEDIVLTLTLFEDREMIEERLKTYAHLFDDKVMKQLKRRRYTGWGRLSRKLINGIRDKQSGKTILDFLKSDGFANRNFMQLIHDDSLTFKEDIQKAQVSGQGDSLHEHIANLAGSPAIKKGILQTVKVVDELVKVMGRHKPENIVIEMARENQTTQKGQKNSRERMKRIEEGIKELGSQILKEHPVENTQLQNEKLYLYYLQNGRDMYVDQELDINRLSDYDVDHIVPQSFLKDDSIDNKVLTRSDKNRGKSDNVPSEEVVKKMKNYWRQLLNAKLITQRKFDNLTKAERGGLSELDKAGFIKRQLVETRQITKHVAQILDSRMNTKYDENDKLIREVKVITLKSKLVSDFRKDFQFYKVREINNYHHAHDAYLNAVVGTALIKKYPKLESEFVYGDYKVYDVRKMIAKSEQEIGKATAKYFFYSNIMNFFKTEITLANGEIRKRPLIETNGETGEIVWDKGRDFATVRKVLSMPQVNIVKKTEVQTGGFSKESILPKRNSDKLIARKKDWDPKKYGGFDSPTVAYSVLVVAKVEKGKSKKLKSVKELLGITIMERSSFEKNPIDFLEAKGYKEVKKDLIIKLPKYSLFELENGRKRMLASAGELQKGNELALPSKYVNFLYLASHYEKLKGSPEDNEQKQLFVEQHKHYLDEIIEQISEFSKRVILADANLDKVLSAYNKHRDKPIREQAENIIHLFTLTNLGAPAAFKYFDTTIDRKRYTSTKEVLDATLIHQSITGLYETRIDLSQLGGDSRADPKKKRKV

SEQ ID NO: 115 - protein, 1386 aa, synthetic construct
  REGION 1..1386: note = source = /note="Description of Artificial Sequence: Synthetic polypeptide"
MAPKKKRKVDKKYSIGLDIGTNSVGWAVITDEYKVPSKKFKVLGNTDRHSIKKNLIGALLFDSGETAEATRLKRTARRRYTRRKNRICYLQEIFSNEMAKVDDSFFHRLEESFLVEEDKKHERHPIFGNIVDEVAYHEKYPTIYHLRKKLVDSTDKADLRLIYLALAHMIKFRGHFLIEGDLNPDNSDVDKLFIQLVQTYNQLFEENPINASGVDAKAILSARLSKSRRLENLIAQLPGEKKNGLFGNLIALSLGLTPNFKSNFDLAEDAKLQLSKDTYDDDLDNLLAQIGDQYADLFLAAKNLSDAILLSDILRVNTEITKAPLSASMIKRYDEHHQDLTLLKALVRQQLPEKYKEIFFDQSKNGYAGYIDGGASQEEFYKFIKPILEKMDGTEELLVKLNREDLLRKQRTFDNGSIPHQIHLGELHAILRRQEDFYPFLKDNREKIEKILTFRIPYYVGPLARGNSRFAWMTRKSEETITPWNFEEVVDKGASAQSFIERMTNFDKNLPNEKVLPKHSLLYEYFTVYNELTKVKYVTEGMRKPAFLSGEQKKAIVDLLFKTNRKVTVKQLKEDYFKKIECFDSVEISGVEDRFNASLGTYHDLLKIIKDKDFLDNEENEDILEDIVLTLTLFEDREMIEERLKTYAHLFDDKVMKQLKRRRYTGWGRLSRKLINGIRDKQSGKTILDFLKSDGFANRNFMQLIHDDSLTFKEDIQKAQVSGQGDSLHEHIANLAGSPAIKKGILQTVKVVDELVKVMGRHKPENIVIEMARENQTTQKGQKNSRERMKRIEEGIKELGSQILKEHPVENTQLQNEKLYLYYLQNGRDMYVDQELDINRLSDYDVDHIVPQSFLKDDSIDNKVLTRSDKNRGKSDNVPSEEVVKKMKNYWRQLLNAKLITQRKFDNLTKAERGGLSELDKAGFIKRQLVETRQITKHVAQILDSRMNTKYDENDKLIREVKVITLKSKLVSDFRKDFQFYKVREINNYHHAHDAYLNAVVGTALIKKYPKLESEFVYGDYKVYDVRKMIAKSEQEIGKATAKYFFYSNIMNFFKTEITLANGEIRKRPLIETNGETGEIVWDKGRDFATVRKVLSMPQVNIVKKTEVQTGGFSKESILPKRNSDKLIARKKDWDPKKYGGFDSPTVAYSVLVVAKVEKGKSKKLKSVKELLGITIMERSSFEKNPIDFLEAKGYKEVKKDLIIKLPKYSLFELENGRKRMLASAGELQKGNELALPSKYVNFLYLASHYEKLKGSPEDNEQKQLFVEQHKHYLDEIIEQISEFSKRVILADANLDKVLSAYNKHRDKPIREQAENIIHLFTLTNLGAPAAFKYFDTTIDRKRYTSTKEVLDATLIHQSITGLYETRIDLSQLGGDSRADHHHHHH

SEQ ID NO: 116 - protein, 1389 aa, synthetic construct
  REGION 1..1389: note = source = /note="Description of Artificial Sequence: Synthetic polypeptide"
MAHHHHHHGGSDKKYSIGLDIGTNSVGWAVITDEYKVPSKKFKVLGNTDRHSIKKNLIGALLFDSGETAEATRLKRTARRRYTRRKNRICYLQEIFSNEMAKVDDSFFHRLEESFLVEEDKKHERHPIFGNIVDEVAYHEKYPTIYHLRKKLVDSTDKADLRLIYLALAHMIKFRGHFLIEGDLNPDNSDVDKLFIQLVQTYNQLFEENPINASGVDAKAILSARLSKSRRLENLIAQLPGEKKNGLFGNLIALSLGLTPNFKSNFDLAEDAKLQLSKDTYDDDLDNLLAQIGDQYADLFLAAKNLSDAILLSDILRVNTEITKAPLSASMIKRYDEHHQDLTLLKALVRQQLPEKYKEIFFDQSKNGYAGYIDGGASQEEFYKFIKPILEKMDGTEELLVKLNREDLLRKQRTFDNGSIPHQIHLGELHAILRRQEDFYPFLKDNREKIEKILTFRIPYYVGPLARGNSRFAWMTRKSEETITPWNFEEVVDKGASAQSFIERMTNFDKNLPNEKVLPKHSLLYEYFTVYNELTKVKYVTEGMRKPAFLSGEQKKAIVDLLFKTNRKVTVKQLKEDYFKKIECFDSVEISGVEDRFNASLGTYHDLLKIIKDKDFLDNEENEDILEDIVLTLTLFEDREMIEERLKTYAHLFDDKVMKQLKRRRYTGWGRLSRKLINGIRDKQSGKTILDFLKSDGFANRNFMQLIHDDSLTFKEDIQKAQVSGQGDSLHEHIANLAGSPAIKKGILQTVKVVDELVKVMGRHKPENIVIEMARENQTTQKGQKNSRERMKRIEEGIKELGSQILKEHPVENTQLQNEKLYLYYLQNGRDMYVDQELDINRLSDYDVDHIVPQSFLKDDSIDNKVLTRSDKNRGKSDNVPSEEVVKKMKNYWRQLLNAKLITQRKFDNLTKAERGGLSELDKAGFIKRQLVETRQITKHVAQILDSRMNTKYDENDKLIREVKVITLKSKLVSDFRKDFQFYKVREINNYHHAHDAYLNAVVGTALIKKYPKLESEFVYGDYKVYDVRKMIAKSEQEIGKATAKYFFYSNIMNFFKTEITLANGEIRKRPLIETNGETGEIVWDKGRDFATVRKVLSMPQVNIVKKTEVQTGGFSKESILPKRNSDKLIARKKDWDPKKYGGFDSPTVAYSVLVVAKVEKGKSKKLKSVKELLGITIMERSSFEKNPIDFLEAKGYKEVKKDLIIKLPKYSLFELENGRKRMLASAGELQKGNELALPSKYVNFLYLASHYEKLKGSPEDNEQKQLFVEQHKHYLDEIIEQISEFSKRVILADANLDKVLSAYNKHRDKPIREQAENIIHLFTLTNLGAPAAFKYFDTTIDRKRYTSTKEVLDATLIHQSITGLYETRIDLSQLGGDSRADPKKKRKV

SEQ ID NO: 117 - protein, 1399 aa, synthetic construct; identical to SEQ ID NO: 113
  REGION 1..1399: note = source = /note="Description of Artificial Sequence: Synthetic polypeptide"

SEQ ID NO: 118 - protein, 1393 aa, synthetic construct
  REGION 1..1393: note = source = /note="Description of Artificial Sequence: Synthetic polypeptide"
MAPKKKRKVDKKYSIGLDIGTNSVGWAVITDEYKVPSKKFKVLGNTDRHSIKKNLIGALLFDSGETAEATRLKRTARRRYTRRKNRICYLQEIFSNEMAKVDDSFFHRLEESFLVEEDKKHERHPIFGNIVDEVAYHEKYPTIYHLRKKLVDSTDKADLRLIYLALAHMIKFRGHFLIEGDLNPDNSDVDKLFIQLVQTYNQLFEENPINASGVDAKAILSARLSKSRRLENLIAQLPGEKKNGLFGNLIALSLGLTPNFKSNFDLAEDAKLQLSKDTYDDDLDNLLAQIGDQYADLFLAAKNLSDAILLSDILRVNTEITKAPLSASMIKRYDEHHQDLTLLKALVRQQLPEKYKEIFFDQSKNGYAGYIDGGASQEEFYKFIKPILEKMDGTEELLVKLNREDLLRKQRTFDNGSIPHQIHLGELHAILRRQEDFYPFLKDNREKIEKILTFRIPYYVGPLARGNSRFAWMTRKSEETITPWNFEEVVDKGASAQSFIERMTNFDKNLPNEKVLPKHSLLYEYFTVYNELTKVKYVTEGMRKPAFLSGEQKKAIVDLLFKTNRKVTVKQLKEDYFKKIECFDSVEISGVEDRFNASLGTYHDLLKIIKDKDFLDNEENEDILEDIVLTLTLFEDREMIEERLKTYAHLFDDKVMKQLKRRRYTGWGRLSRKLINGIRDKQSGKTILDFLKSDGFANRNFMQLIHDDSLTFKEDIQKAQVSGQGDSLHEHIANLAGSPAIKKGILQTVKVVDELVKVMGRHKPENIVIEMARENQTTQKGQKNSRERMKRIEEGIKELGSQILKEHPVENTQLQNEKLYLYYLQNGRDMYVDQELDINRLSDYDVDHIVPQSFLKDDSIDNAVLTRSDKNRGKSDNVPSEEVVKKMKNYWRQLLNAKLITQRKFDNLTKAERGGLSELDKAGFIKRQLVETRQITKHVAQILDSRMNTKYDENDKLIREVKVITLKSKLVSDFRKDFQFYKVREINNYHHAHDAYLNAVVGTALIKKYPKLESEFVYGDYKVYDVRKMIAKSEQEIGKATAKYFFYSNIMNFFKTEITLANGEIRKRPLIETNGETGEIVWDKGRDFATVRKVLSMPQVNIVKKTEVQTGGFSKESILPKRNSDKLIARKKDWDPKKYGGFDSPTVAYSVLVVAKVEKGKSKKLKSVKELLGITIMERSSFEKNPIDFLEAKGYKEVKKDLIIKLPKYSLFELENGRKRMLASAGELQKGNELALPSKYVNFLYLASHYEKLKGSPEDNEQKQLFVEQHKHYLDEIIEQISEFSKRVILADANLDKVLSAYNKHRDKPIREQAENIIHLFTLTNLGAPAAFKYFDTTIDRKRYTSTKEVLDATLIHQSITGLYETRIDLSQLGGDSRADPKKKRKVHHHHHH

SEQ ID NO: 119 - protein, 1393 aa, synthetic construct
  REGION 1..1393: note = source = /note="Description of Artificial Sequence: Synthetic polypeptide"
MAPKKKRKVDKKYSIGLDIGTNSVGWAVITDEYKVPSKKFKVLGNTDRHSIKKNLIGALLFDSGETAEATRLKRTARRRYTRRKNRICYLQEIFSNEMAKVDDSFFHRLEESFLVEEDKKHERHPIFGNIVDEVAYHEKYPTIYHLRKKLVDSTDKADLRLIYLALAHMIKFRGHFLIEGDLNPDNSDVDKLFIQLVQTYNQLFEENPINASGVDAKAILSARLSKSRRLENLIAQLPGEKKNGLFGNLIALSLGLTPNFKSNFDLAEDAKLQLSKDTYDDDLDNLLAQIGDQYADLFLAAKNLSDAILLSDILRVNTEITKAPLSASMIKRYDEHHQDLTLLKALVRQQLPEKYKEIFFDQSKNGYAGYIDGGASQEEFYKFIKPILEKMDGTEELLVKLNREDLLRKQRTFDNGSIPHQIHLGELHAILRRQEDFYPFLKDNREKIEKILTFRIPYYVGPLARGNSRFAWMTRKSEETITPWNFEEVVDKGASAQSFIERMTNFDKNLPNEKVLPKHSLLYEYFTVYNELTKVKYVTEGMRKPAFLSGEQKKAIVDLLFKTNRKVTVKQLKEDYFKKIECFDSVEISGVEDRFNASLGTYHDLLKIIKDKDFLDNEENEDILEDIVLTLTLFEDREMIEERLKTYAHLFDDKVMKQLKRRRYTGWGRLSRKLINGIRDKQSGKTILDFLKSDGFANRNFMQLIHDDSLTFKEDIQKAQVSGQGDSLHEHIANLAGSPAIKKGILQTVKVVDELVKVMGRHKPENIVIEMARENQTTQKGQKNSRERMKRIEEGIKELGSQILKEHPVENTQLQNEALYLYYLQNGRDMYVDQELDINRLSDYDVDHIVPQSFLKDDSIDNKVLTRSDKNRGKSDNVPSEEVVKKMKNYWRQLLNAKLITQRKFDNLTKAERGGLSELDKAGFIKRQLVETRQITKHVAQILDSRMNTKYDENDKLIREVKVITLKSKLVSDFRKDFQFYKVREINNYHHAHDAYLNAVVGTALIKKYPALESEFVYGDYKVYDVRKMIAKSEQEIGKATAKYFFYSNIMNFFKTEITLANGEIRKAPLIETNGETGEIVWDKGRDFATVRKVLSMPQVNIVKKTEVQTGGFSKESILPKRNSDKLIARKKDWDPKKYGGFDSPTVAYSVLVVAKVEKGKSKKLKSVKELLGITIMERSSFEKNPIDFLEAKGYKEVKKDLIIKLPKYSLFELENGRKRMLASAGELQKGNELALPSKYVNFLYLASHYEKLKGSPEDNEQKQLFVEQHKHYLDEIIEQISEFSKRVILADANLDKVLSAYNKHRDKPIREQAENIIHLFTLTNLGAPAAFKYFDTTIDRKRYTSTKEVLDATLIHQSITGLYETRIDLSQLGGDSRADPKKKRKVHHHHHH

SEQ ID NO: 120 - protein, 1393 aa, synthetic construct
  REGION 1..1393: note = source = /note="Description of Artificial Sequence: Synthetic polypeptide"
MAPKKKRKVDKKYSIGLDIGTNSVGWAVITDEYKVPSKKFKVLGNTDRHSIKKNLIGALLFDSGETAEATRLKRTARRRYTRRKNRICYLQEIFSNEMAKVDDSFFHRLEESFLVEEDKKHERHPIFGNIVDEVAYHEKYPTIYHLRKKLVDSTDKADLRLIYLALAHMIKFRGHFLIEGDLNPDNSDVDKLFIQLVQTYNQLFEENPINASGVDAKAILSARLSKSRRLENLIAQLPGEKKNGLFGNLIALSLGLTPNFKSNFDLAEDAKLQLSKDTYDDDLDNLLAQIGDQYADLFLAAKNLSDAILLSDILRVNTEITKAPLSASMIKRYDEHHQDLTLLKALVRQQLPEKYKEIFFDQSKNGYAGYIDGGASQEEFYKFIKPILEKMDGTEELLVKLNREDLLRKQRTFDNGSIPHQIHLGELHAILRRQEDFYPFLKDNREKIEKILTFRIPYYVGPLARGNSRFAWMTRKSEETITPWNFEEVVDKGASAQSFIERMTNFDKNLPNEKVLPKHSLLYEYFTVYNELTKVKYVTEGMRKPAFLSGEQKKAIVDLLFKTNRKVTVKQLKEDYFKKIECFDSVEISGVEDRFNASLGTYHDLLKIIKDKDFLDNEENEDILEDIVLTLTLFEDREMIEERLKTYAHLFDDKVMKQLKRRRYTGWGRLSRKLINGIRDKQSGKTILDFLKSDGFANRNFMQLIHDDSLTFKEDIQKAQVSGQGDSLHEHIANLAGSPAIKKGILQTVKVVDELVKVMGRHKPENIVIEMARENQTTQKGQKNSRERMKRIEEGIKELGSQILKEHPVENTQLQNEKLYLYYLQNGRDMYVDQELDINRLSDYDVDHIVPQSFLADDSIDNKVLTRSDKNRGKSDNVPSEEVVKKMKNYWRQLLNAKLITQRKFDNLTKAERGGLSELDKAGFIKRQLVETRQITKHVAQILDSRMNTKYDENDKLIREVKVITLKSKLVSDFRKDFQFYKVREINNYHHAHDAYLNAVVGTALIKKYPALESEFVYGDYKVYDVRKMIAKSEQEIGKATAKYFFYSNIMNFFKTEITLANGEIRKAPLIETNGETGEIVWDKGRDFATVRKVLSMPQVNIVKKTEVQTGGFSKESILPKRNSDKLIARKKDWDPKKYGGFDSPTVAYSVLVVAKVEKGKSKKLKSVKELLGITIMERSSFEKNPIDFLEAKGYKEVKKDLIIKLPKYSLFELENGRKRMLASAGELQKGNELALPSKYVNFLYLASHYEKLKGSPEDNEQKQLFVEQHKHYLDEIIEQISEFSKRVILADANLDKVLSAYNKHRDKPIREQAENIIHLFTLTNLGAPAAFKYFDTTIDRKRYTSTKEVLDATLIHQSITGLYETRIDLSQLGGDSRADPKKKRKVHHHHHH

SEQ ID NO: 121 - protein, 1393 aa, synthetic construct
  REGION 1..1393: note = source = /note="Description of Artificial Sequence: Synthetic polypeptide"
MAPKKKRKVDKKYSIGLDIGTNSVGWAVITDEYKVPSKKFKVLGNTDRHSIKKNLIGALLFDSGETAEATRLKRTARRRYTRRKNRICYLQEIFSNEMAKVDDSFFHRLEESFLVEEDKKHERHPIFGNIVDEVAYHEKYPTIYHLRKKLVDSTDKADLRLIYLALAHMIKFRGHFLIEGDLNPDNSDVDKLFIQLVQTYNQLFEENPINASGVDAKAILSARLSKSRRLENLIAQLPGEKKNGLFGNLIALSLGLTPNFKSNFDLAEDAKLQLSKDTYDDDLDNLLAQIGDQYADLFLAAKNLSDAILLSDILRVNTEITKAPLSASMIKRYDEHHQDLTLLKALVRQQLPEKYKEIFFDQSKNGYAGYIDGGASQEEFYKFIKPILEKMDGTEELLVKLNREDLLRKQRTFDNGSIPHQIHLGELHAILRRQEDFYPFLKDNREKIEKILTFRIPYYVGPLARGNSRFAWMTRKSEETITPWNFEEVVDKGASAQSFIERMTAFDKNLPNEKVLPKHSLLYEYFTVYNELTKVKYVTEGMRKPAFLSGEQKKAIVDLLFKTNRKVTVKQLKEDYFKKIECFDSVEISGVEDRFNASLGTYHDLLKIIKDKDFLDNEENEDILEDIVLTLTLFEDREMIEERLKTYAHLFDDKVMKQLKRRRYTGWGALSRKLINGIRDKQSGKTILDFLKSDGFANRNFMALIHDDSLTFKEDIQKAQVSGQGDSLHEHIANLAGSPAIKKGILQTVKVVDELVKVMGRHKPENIVIEMARENQTTQKGQKNSRERMKRIEEGIKELGSQILKEHPVENTQLQNEKLYLYYLQNGRDMYVDQELDINRLSDYDVDHIVPQSFLKDDSIDNKVLTRSDKNRGKSDNVPSEEVVKKMKNYWRQLLNAKLITQRKFDNLTKAERGGLSELDKAGFIKRQLVETRAITKHVAQILDSRMNTKYDENDKLIREVKVITLKSKLVSDFRKDFQFYKVREINNYHHAHDAYLNAVVGTALIKKYPKLESEFVYGDYKVYDVRKMIAKSEQEIGKATAKYFFYSNIMNFFKTEITLANGEIRKRPLIETNGETGEIVWDKGRDFATVRKVLSMPQVNIVKKTEVQTGGFSKESILPKRNSDKLIARKKDWDPKKYGGFDSPTVAYSVLVVAKVEKGKSKKLKSVKELLGITIMERSSFEKNPIDFLEAKGYKEVKKDLIIKLPKYSLFELENGRKRMLASAGELQKGNELALPSKYVNFLYLASHYEKLKGSPEDNEQKQLFVEQHKHYLDEIIEQISEFSKRVILADANLDKVLSAYNKHRDKPIREQAENIIHLFTLTNLGAPAAFKYFDTTIDRKRYTSTKEVLDATLIHQSITGLYETRIDLSQLGGDSRADPKKKRKVHHHHHH

SEQ ID NO: 122 - DNA, 4107 bp, synthetic construct
  misc_feature 1..4107: note = source = /note="Description of Artificial Sequence: Synthetic polynucleotide"
  source 1..4107: mol_type = other DNA
atggataaaaagtacagcatcgggctggacatcggtacaaactcagtggggtgggccgtgattacggacgagtacaaggtaccctccaaaaaatttaaagtgctgggtaacacggacagacactctataaagaaaaatcttattggagccttgctgttcgactcaggcgagacagccgaagccacaaggttgaagcggaccgccaggaggcggtataccaggagaaagaaccgcatatgctacctgcaagaaatcttcagtaacgagatggcaaaggttgacgatagctttttccatcgcctggaagaatcctttcttgttgaggaagacaagaagcacgaacggcaccccatctttggcaatattgtcgacgaagtggcatatcacgaaaagtacccgactatctaccacctcaggaagaagctggtggactctaccgataaggcggacctcagacttatttatttggcactcgcccacatgattaaatttagaggacatttcttgatcgagggcgacctgaacccggacaacagtgacgtcgataagctgttcatccaacttgtgcagacctacaatcaactgttcgaagaaaaccctataaatgcttcaggagtcgacgctaaagcaatcctgtccgcgcgcctctcaaaatctagaagacttgagaatctgattgctcagttgcccggggaaaagaaaaatggattgtttggcaacctgatcgccctcagtctcggactgaccccaaatttcaaaagtaacttcgacctggccgaagacgctaagctccagctgtccaaggacacatacgatgacgacctcgacaatctgctggcccagattggggatcagtacgccgatctctttttggcagcaaagaacctgtccgacgccatcctgttgagcgatatcttgagagtgaacaccgaaattactaaagcaccccttagcgcatctatgatcaagcggtacgacgagcatcatcaggatctgaccctgctgaaggctcttgtgaggcaacagctccccgaaaaatacaaggaaatcttctttgaccagagcaaaaacggctacgctggctatatagatggtggggccagtcaggaggaattctataaattcatcaagcccattctcgagaaaatggacggcacagaggagttgctggtcaaacttaacagggaggacctgctgcggaagcagcggacctttgacaacgggtctatcccccaccagattcatctgggcgaactgcacgcaatcctgaggaggcaggaggatttttatccttttcttaaagataaccgcgagaaaatagaaaagattcttacattcaggatcccgtactacgtgggacctctcgcccggggcaattcacggtttgcctggatgacaaggaagtcagaggagactattacaccttggaacttcgaagaagtggtggacaagggtgcatctgcccagtctttcatcgagcggatgacaaattttgacaagaacctccctaatgagaaggtgctgcccaaacattctctgctctacgagtactttaccgtctacaatgaactgactaaagtcaagtacgtcaccgagggaatgaggaagccggcattccttagtggagaacagaagaaggcgattgtagacctgttgttcaagaccaacaggaaggtgactgtgaagcaacttaaagaagactactttaagaagatcgaatgttttgacagtgtggaaatttcaggggttgaagaccgcttcaatgcgtcattggggacttaccatgatcttctcaagatcataaaggacaaagacttcctggacaacgaagaaaatgaggatattctcgaagacatcgtcctcaccctgaccctgttcgaagacagggaaatgatagaagagcgcttgaaaacctatgcccacctcttcgacgataaagttatgaagcagctgaagcgcaggagatacacaggatggggaagattgtcaaggaagctgatcaatggaattagggataaacagagtggcaagaccatactggatttcctcaaatctgatggcttcgccaataggaacttcatgcaactgattcacgatgactctcttaccttcaaggaggacattcaaaaggctcaggtgagcgggcagggagactcccttcatgaacacatcgcgaatttggcaggttcccccgctattaaaaagggcatccttcaaactgtcaaggtggtggatgaattggtcaaggtaatgggcagacataagccagaaaatattgtgatcgagatggcccgcgaaaaccagaccacacagaagggccagaaaaatagtagagagcggatgaagaggatcgaggagggcatcaaagagctgggatctcagattctcaaagaacaccccgtagaaaacacacagctgcagaacgaaaaattgtacttgtactatctgcagaacggcagagacatgtacgtcgaccaagaacttgatattaatagactgtccgactatgacgtagaccatatcgtgccccagtccttcctgaaggacgactccattgataacaaagtcttgacaagaagcgacaagaacaggggtaaaagtgataatgtgcctagcgaggaggtggtgaaaaaaatgaagaactactggcgacagctgcttaatgcaaagctcattacacaacggaagttcgataatctgacgaaagcagagagaggtggcttgtctgagttggacaaggcagggtttattaagcggcagctggtggaaactaggcagatcacaaagcacgtggcgcagattttggacagccggatgaacacaaaatacgacgaaaatgataaactgatacgagaggtcaaagttatcacgctgaaaagcaagctggtgtccgattttcggaaagacttccagttctacaaagttcgcgagattaataactaccatcatgctcacgatgcgtacctgaacgctgttgtcgggaccgccttgataaagaagtacccaaagctggaatccgagttcgtatacggggattacaaagtgtacgatgtgaggaaaatgatagccaagtccgagcaggagattggaaaggccacagctaagtacttcttttattctaacatcatgaatttttttaagacggaaattaccctggccaacggagagatcagaaagcggccccttatagagacaaatggtgaaacaggtgaaatcgtctgggataagggcagggatttcgctactgtgaggaaggtgctgagtatgccacaggtaaatatcgtgaaaaaaaccgaagtacagaccggaggattttccaaggaaagcattttgcctaaaagaaactcagacaagctcatcgcccgcaagaaagattgggaccctaagaaatacgggggatttgactcacccaccgtagcctattctgtgctggtggtagctaaggtggaaaaaggaaagtctaagaagctgaagtccgtgaaggaactcttgggaatcactatcatggaaagatcatcctttgaaaagaaccctatcgatttcctggaggctaagggttacaaggaggtcaagaaagacctcatcattaaactgccaaaatactctctcttcgagctggaaaatggcaggaagagaatgttggccagcgccggagagctgcaaaagggaaacgagcttgctctgccctccaaatatgttaattttctctatctcgcttcccactatgaaaagctgaaagggtctcccgaagataacgagcagaagcagctgttcgtcgaacagcacaagcactatctggatgaaataatcgaacaaataagcgagttcagcaaaagggttatcctggcggatgctaatttggacaaagtactgtctgcttataacaagcaccgggataagcctattagggaacaagccgagaatataattcacctctttacactcacgaatctcggagcccccgccgccttcaaatactttgatacgactatcgaccggaaacggtataccagtaccaaagaggtcctcgatgccaccctcatccaccagtcaattactggcctgtacgaaacacggatcgacctctctcaactgggcggcgactag

SEQ ID NO: 123 - protein, 1386 aa, synthetic construct
  REGION 1..1386: note = source = /note="Description of Artificial Sequence: Synthetic polypeptide"
MAPKKKRKVDKKYSIGLDIGTNSVGWAVITDEYKVPSKKFKVLGNTDRHSIKKNLIGALLFDSGETAEATRLKRTARRRYTRRKNRILYLQEIFSNEMAKVDDSFFHRLEESFLVEEDKKHERHPIFGNIVDEVAYHEKYPTIYHLRKKLVDSTDKADLRLIYLALAHMIKFRGHFLIEGDLNPDNSDVDKLFIQLVQTYNQLFEENPINASGVDAKAILSARLSKSRRLENLIAQLPGEKKNGLFGNLIALSLGLTPNFKSNFDLAEDAKLQLSKDTYDDDLDNLLAQIGDQYADLFLAAKNLSDAILLSDILRVNTEITKAPLSASMIKRYDEHHQDLTLLKALVRQQLPEKYKEIFFDQSKNGYAGYIDGGASQEEFYKFIKPILEKMDGTEELLVKLNREDLLRKQRTFDNGSIPHQIHLGELHAILRRQEDFYPFLKDNREKIEKILTFRIPYYVGPLARGNSRFAWMTRKSEETITPWNFEEVVDKGASAQSFIERMTNFDKNLPNEKVLPKHSLLYEYFTVYNELTKVKYVTEGMRKPAFLSGEQKKAIVDLLFKTNRKVTVKQLKEDYFKKIEEFDSVEISGVEDRFNASLGTYHDLLKIIKDKDFLDNEENEDILEDIVLTLTLFEDREMIEERLKTYAHLFDDKVMKQLKRRRYTGWGRLSRKLINGIRDKQSGKTILDFLKSDGFANRNFMQLIHDDSLTFKEDIQKAQVSGQGDSLHEHIANLAGSPAIKKGILQTVKVVDELVKVMGRHKPENIVIEMARENQTTQKGQKNSRERMKRIEEGIKELGSQILKEHPVENTQLQNEKLYLYYLQNGRDMYVDQELDINRLSDYDVDHIVPQSFLKDDSIDNKVLTRSDKNRGKSDNVPSEEVVKKMKNYWRQLLNAKLITQRKFDNLTKAERGGLSELDKAGFIKRQLVETRQITKHVAQILDSRMNTKYDENDKLIREVKVITLKSKLVSDFRKDFQFYKVREINNYHHAHDAYLNAVVGTALIKKYPKLESEFVYGDYKVYDVRKMIAKSEQEIGKATAKYFFYSNIMNFFKTEITLANGEIRKRPLIETNGETGEIVWDKGRDFATVRKVLSMPQVNIVKKTEVQTGGFSKESILPKRNSDKLIARKKDWDPKKYGGFDSPTVAYSVLVVAKVEKGKSKKLKSVKELLGITIMERSSFEKNPIDFLEAKGYKEVKKDLIIKLPKYSLFELENGRKRMLASAGELQKGNELALPSKYVNFLYLASHYEKLKGSPEDNEQKQLFVEQHKHYLDEIIEQISEFSKRVILADANLDKVLSAYNKHRDKPIREQAENIIHLFTLTNLGAPAAFKYFDTTIDRKRYTSTKEVLDATLIHQSITGLYETRIDLSQLGGDSRADHHHHHH

SEQ ID NO: 124 - DNA, 401 bp, synthetic construct
  misc_feature 1..401: note = source = /note="Description of Artificial Sequence: Synthetic polynucleotide"
  source 1..401: mol_type = other DNA
gaattcctgttgcaaagtgacctgctttggcataactagcactctcatgataggttggcacattagtttcctgtcaattgtgttgacaagcacatgagaatcatggaaatccttggtgttaatctaaaccagtgactatgcattgccagttacagttaacttccaggaaaatctcaaaattcagtgccagttacctggtagattgtaatcagttaagcaaaaagccaaatacaagccattcaccttacagagagagaagcatattcaccttacagagagagaagcataaatgagaaacacatcatcattgtcacagtaactgtggtaacctattgtaaaagattcacagtgcaaaagagcctgactacatattacagtgggtaaaatggatcggtcttgta

SEQ ID NO: 125 - DNA, 312 bp, synthetic construct
  misc_feature 1..312: note = source = /note="Description of Artificial Sequence: Synthetic polynucleotide"
  source 1..312: mol_type = other DNA
tgaggggaaaatagatacatgttatatatatatatatatatatatatgttctataccaacaaagggttcagggtataattttgcatgtaaaggggtgacccagagtagagataaagaacaaaatattctgttgaaaaaactatgaatcaatcaacctaatgaattatcaacatggatgtaggtgtagttgaagaagatggtcagtgagaatatggaaacagatatcaggaattaaagtcatattctagggcagaaaagcattcatggaggtattagatgatagctgaagtaatttgaagaagctggtgtgaa

SEQ ID NO: 126 - DNA, 3518 bp, synthetic construct
  misc_feature 1..3518: note = source = /note="Description of Artificial Sequence: Synthetic polynucleotide"
  source 1..3518: mol_type = other DNA
gaattcctgttgcaaagtgacctgctttggcataactagcactctcatgataggttggcacattagtttcctgtcaattgtgttgacaagcacatgagaatcatggaaatccttggtgttaatctaaaccagtgactatgcattgccagttacagttaacttccaggaaaatctcaaaattcagtgccagttacctggtagattgtaatcagttaagcaaaaagccaaatacaagccattcaccttacagagagagaagcatattcaccttacagagagagaagcataaatgagaaacacatcatcattgtcacagtaactgtggtaacctattgtaaaagattcacagtgcaaaagagcctgactacatattacagtgggtaaaatggatcggtcttgtaaccggtgcctagagaaggtggcgcggggtaaactgggaaagtgatgtcgtgtactggctccgcctttttcccgagggtgggggagaaccgtatataagtgcagtagtcgccgtgaacgttctttttcgcaacgggtttgccgccagaacacaggtaagtgccgtgtgtggttcccgcgggcctggcctctttacgggttatggcccttgcgtgccttgaattacttccacctggctgcagtacgtgattcttgatcccgagcttcgggttggaagtgggtgggagagttcgaggccttgcgcttaaggagccccttcgcctcgtgcttgagttgaggcctggcctgggcgctggggccgccgcgtgcgaatctggtggcaccttcgcgcctgtctcgctgctttcgataagtctctagccatttaaaatttttgatgacctgctgcgacgctttttttctggcaagatagtcttgtaaatgcgggccaagatctgcacactggtatttcggtttttggggccgcgggcggcgacggggcccgtgcgtcccagcgcacatgttcggcgaggcggggcctgcgagcgcggccaccgagaatcggacgggggtagtctcaagctggccggcctgctctggtgcctggcctcgcgccgccgtgtatcgccccgccctgggcggcaaggctggcccggtcggcaccagttgcgtgagcggaaagatggccgcttcccggccctgctgcagggagctcaaaatggaggacgcggcgctcgggagagcgggcgggtgagtcacccacacaaaggaaaagggcctttccgtcctcagccgtcgcttcatgtgactccactgagtaccgggcgccgtccaggcacctcgattagttctcgagcttttggagtacgtcgtctttaggttggggggaggggttttatgcgatggagtttccccacactgagtgggtggagactgaagttaggccagcttggcacttgatgtaattctccttggaatttgccctttttgagtttggatcttggttcattctcaagcctcagacagtggttcaaagtttttttcttccatttcaggtgtcgtgatctagaggatccatggccctccctgtcaccgccctgctgcttccgctggctcttctgctccacgccgctcggcccgaagtgcaattggtggaatcagggggaggacttgtgcagcctggaggatcgctgagactgtcatgtgccgtgtccggctttgccctgtccaaccacgggatgtcctgggtccgccgcgcgcctggaaagggcctcgaatgggtgtcgggtattgtgtacagcggtagcacctactatgccgcatccgtgaaggggagattcaccatcagccgggacaactccaggaacactctgtacctccaaatgaattcgctgaggccagaggacactgccatctactactgctccgcgcatggcggagagtccgacgtctggggacaggggaccaccgtgaccgtgtctagcgcgtccggcggaggcggcagcgggggtcgggcatcagggggcggcggatcggacatccagctcacccagtccccgagctcgctgtccgcctccgtgggagatcgggtcaccatcacgtgccgcgccagccagtcgatttcctcctacctgaactggtaccaacagaagcccggaaaagccccgaagcttctcatctacgccgcctcgagcctgcagtcaggagtgccctcacggttctccggctccggttccggtactgatttcaccctgaccatttcctccctgcaaccggaggacttcgctacttactactgccagcagtcgtactccaccccctacactttcggacaaggcaccaaggtcgaaatcaagaccactaccccagcaccgaggccacccaccccggctcctaccatcgcctcccagcctctgtccctgcgtccggaggcatgtagacccgcagctggtggggccgtgcatacccggggtcttgacttcgcctgcgatatctacatttgggcccctctggctggtacttgcggggtcctgctgctttcactcgtgatcactctttactgtaagcgcggtcggaagaagctgctgtacatctttaagcaacccttcatgaggcctgtgcagactactcaagaggaggacggctgttcatgccggttcccagaggaggaggaaggcggctgcgaactgcgcgtgaaattcagccgcagcgcagatgctccagcctaccagcaggggcagaaccagctctacaacgaactcaatcttggtcggagagaggagtacgacgtgctggacaagcggagaggacgggacccagaaatgggcgggaagccgcgcagaaagaatccccaagagggcctgtacaacgagctccaaaaggataagatggcagaagcctatagcgagattggtatgaaaggggaacgcagaagaggcaaaggccacgacggactgtaccagggactcagcaccgccaccaaggacacctatgacgctcttcacatgcaggccctgccgcctcggtaagtcgacgcctcgactgtgccttctagttgccagccatctgttgtttgcccctcccccgtgccttccttgaccctggaaggtgccactcccactgtcctttcctaataaaatgaggaaattgcatcgcattgtctgagtaggtgtcattctattctggggggtggggtggggcaggacagcaagggggaggattgggaagacaatagcaggcatgctggggatgcggtgggctctatgggatgaggggaaaatagatacatgttatatatatatatatatatatatatgttctataccaacaaagggttcagggtataattttgcatgtaaaggggtgacccagagtagagataaagaacaaaatattctgttgaaaaaactatgaatcaatcaacctaatgaattatcaacatggatgtaggtgtagttgaagaagatggtcagtgagaatatggaaacagatatcaggaattaaagtcatattctagggcagaaaagcattcatggaggtattagatgatagctgaagtaatttgaagaagctggtgtgaa

SEQ ID NO: 127-129 - skipped (3 entries)

SEQ ID NO: 130 - protein, 21 aa, synthetic construct
  VARIANT 1..3: note = /replace=" "
  REGION 1..21: note = misc_feature - /note="Variant residues given in the sequence have no preference with respect to those in the annotations for variant positions"
  REGION 1..21: note = source = /note="Description of Artificial Sequence: Synthetic peptide"
GSGEGRGSLLTCGDVEENPGP

SEQ ID NO: 131 - protein, 22 aa, synthetic construct
  VARIANT 1..3: note = /replace=" "
  REGION 1..22: note = misc_feature - /note="Variant residues given in the sequence have no preference with respect to those in the annotations for variant positions"
  REGION 1..22: note = source = /note="Description of Artificial Sequence: Synthetic peptide"
GSGATNFSLLKQAGDVEENPGP

SEQ ID NO: 132 - protein, 23 aa, synthetic construct
  VARIANT 1..3: note = /replace=" "
  REGION 1..23: note = misc_feature - /note="Variant residues given in the sequence have no preference with respect to those in the annotations for variant positions"
  REGION 1..23: note = source = /note="Description of Artificial Sequence: Synthetic peptide"
GSGQCTNYALLKLAGDVESNPGP

SEQ ID NO: 133 - protein, 25 aa, synthetic construct
  VARIANT 1..3: note = /replace=" "
  REGION 1..25: note = misc_feature - /note="Variant residues given in the sequence have no preference with respect to those in the annotations for variant positions"
  REGION 1..25: note = source = /note="Description of Artificial Sequence: Synthetic peptide"
GSGVKQTLNFDLLKLAGDVESNPGP

SEQ ID NO: 134-149 - skipped (16 entries)

SEQ ID NO: 150 - protein, 243 aa, synthetic construct
  REGION 1..243: note = source = /note="Description of Artificial Sequence: Synthetic polypeptide"
QVQLVQSGAEVKKPGASVKVSCKASGYTFTGYYMHWVRQAPGQGLEWMGWINPNSGGTNYAQKFQGRVTMTRDTSISTAYMELSRLRSDDTAVYYCARDMNILATVPFDIWGQGTMVTVSSGGGGSGGGGSGGGGSDIQMTQSPSSLSASVGDRVTITCRASQSISTYLNWYQQKPGKAPNLLIYAAFSLQSGVPSRFSGSGSGTDFTLTINSLQPEDFATYYCQQGDSVPLTFGGGTKLEIK

SEQ ID NO: 151 - protein, 243 aa, synthetic construct
  REGION 1..243: note = source = /note="Description of Artificial Sequence: Synthetic polypeptide"
QVQLVQSGAEVKKPGASVKVSCKASGYTFTGYYMHWVRQAPGQGLEWMGWINPNSGGTNYAQKFQGRVTLTRDTSISTVYMELSRLRSDDTAVYYCARDMNILATVPFDIWGQGTMVTVSSGGGGSGGGGSGGGGSDIQMTQSPSSLSASVGDRVTITCRASQSISSYLNWYQQKPGKAPKLLIYAASSLQSGVPSRFSGSGSGTDFTLTVNSLQPEDFATYYCQQGDSVPLTFGGGTRLEIK

SEQ ID NO: 152 - skipped

SEQ ID NO: 153 - protein, 243 aa, synthetic construct
  REGION 1..243: note = source = /note="Description of Artificial Sequence: Synthetic polypeptide"
QVQLVQSGAEVKKPGASVKVSCKASGYIFTGYYIHWVRQAPGQGLEWMGWINPNSGGTNYAQKFQGRVTMTRDTSISTAYMELSGLRSDDPAVYYCARDMNILATVPFDIWGQGTLVTVSSGGGGSGGGGSGGGGSDIQLTQSPSSLSASVGDRVTITCRASQSISSYLNWYQQKPGKAPKLLIYAASSLQSGVPSRFSGSGSGTDFTLTVNSLQPEDFATYYCQQGDSVPLTFGGGTKVEIK

SEQ ID NO: 154 - protein, 245 aa, synthetic construct
  REGION 1..245: note = source = /note="Description of Artificial Sequence: Synthetic polypeptide"
QVQLQQSGAEVKKSGASVKVSCKASGYTFTDYYMHWLRQAPGQGLEWMGWINPNSGDTNYAQKFQGRVTLTRDTSISTVYMELSRLRSDDTAVYYCARDMNILATVPFDIWGQGTMVTVSSASGGGGSGGRASGGGGSDIQMTQSPSSLSASVGDRVTITCRASQSISSYLNWYQQKPGKAPKLLIYAASSLQSGVPSRFSGSGSGTDFTLTISSLQPEDFATYYCQQGDSVPLTFGGGTKVEIK

SEQ ID NO: 155 - protein, 487 aa, synthetic construct
  REGION 1..487: note = source = /note="Description of Artificial Sequence: Synthetic polypeptide"
MALPVTALLLPLALLLHAARPQVQLVQSGAEVKKPGASVKVSCKASGYTFTGYYMHWVRQAPGQGLEWMGWINPNSGGTNYAQKFQGRVTLTRDTSISTVYMELSRLRSDDTAVYYCARDMNILATVPFDIWGQGTMVTVSSGGGGSGGGGSGGGGSDIQMTQSPSSLSASVGDRVTITCRASQSISSYLNWYQQKPGKAPKLLIYAASSLQSGVPSRFSGSGSGTDFTLTVNSLQPEDFATYYCQQGDSVPLTFGGGTRLEIKTTTPAPRPPTPAPTIASQPLSLRPEACRPAAGGAVHTRGLDFACDIYIWAPLAGTCGVLLLSLVITLYCKRGRKKLLYIFKQPFMRPVQTTQEEDGCSCRFPEEEEGGCELRVKFSRSADAPAYKQGQNQLYNELNLGRREEYDVLDKRRGRDPEMGGKPRRKNPQEGLYNELQKDKMAEAYSEIGMKGERRRGKGHDGLYQGLSTATKDTYDALHMQALPPR

SEQ ID NO: 156 - protein, 487 aa, synthetic construct
  REGION 1..487: note = source = /note="Description of Artificial Sequence: Synthetic polypeptide"
MALPVTALLLPLALLLHAARPQVQLVQSGAEVKKPGASVKVSCKASGYIFTGYYIHWVRQAPGQGLEWMGWINPNSGGTNYAQKFQGRVTMTRDTSISTAYMELSGLRSDDPAVYYCARDMNILATVPFDIWGQGTLVTVSSGGGGSGGGGSGGGGSDIQLTQSPSSLSASVGDRVTITCRASQSISSYLNWYQQKPGKAPKLLIYAASSLQSGVPSRFSGSGSGTDFTLTVNSLQPEDFATYYCQQGDSVPLTFGGGTKVEIKTTTPAPRPPTPAPTIASQPLSLRPEACRPAAGGAVHTRGLDFACDIYIWAPLAGTCGVLLLSLVITLYCKRGRKKLLYIFKQPFMRPVQTTQEEDGCSCRFPEEEEGGCELRVKFSRSADAPAYKQGQNQLYNELNLGRREEYDVLDKRRGRDPEMGGKPRRKNPQEGLYNELQKDKMAEAYSEIGMKGERRRGKGHDGLYQGLSTATKDTYDALHMQALPPR

SEQ ID NO: 157 - protein, 336 aa, synthetic construct
  REGION 1..336: note = source = /note="Description of Artificial Sequence: Synthetic polypeptide"
MALPVTALLLPLALLLHAARPQVQLQQSGAEVKKSGASVKVSCKASGYTFTDYYMHWLRQAPGQGLEWMGWINPNSGDTNYAQKFQGRVTLTRDTSISTVYMELSRLRSDDTAVYYCARDMNILATVPFDIWGQGTMVTVSSASGGGGSGGRASGGGGSDIQMTQSPSSLSASVGDRVTITCRASQSISSYLNWYQQKPGKAPKLLIYAASSLQSGVPSRFSGSGSGTDFTLTISSLQPEDFATYYCQQGDSVPLTFGGGTKVEIKTTTPAPRPPTPAPTIASQPLSLRPEACRPAAGGAVHTRGLDFACDIYIWAPLAGTCGVLLLSLVITLYCK

SEQ ID NO: 158 - protein, 487 aa, synthetic construct
  REGION 1..487: note = source = /note="Description of Artificial Sequence: Synthetic polypeptide"
MALPVTALLLPLALLLHAARPQVQLVQSGAEVKKPGASVKVSCKASGYTFTGYYMHWVRQAPGQGLEWMGWINPNSGGTNYAQKFQGRVTMTRDTSISTAYMELSRLRSDDTAVYYCARDMNILATVPFDIWGQGTMVTVSSGGGGSGGGGSGGGGSDIQMTQSPSSLSASVGDRVTITCRASQSISTYLNWYQQKPGKAPNLLIYAAFSLQSGVPSRFSGSGSGTDFTLTINSLQPEDFATYYCQQGDSVPLTFGGGTKLEIKTTTPAPRPPTPAPTIASQPLSLRPEACRPAAGGAVHTRGLDFACDIYIWAPLAGTCGVLLLSLVITLYCKRGRKKLLYIFKQPFMRPVQTTQEEDGCSCRFPEEEEGGCELRVKFSRSADAPAYKQGQNQLYNELNLGRREEYDVLDKRRGRDPEMGGKPRRKNPQEGLYNELQKDKMAEAYSEIGMKGERRRGKGHDGLYQGLSTATKDTYDALHMQALPPR

SEQ ID NO: 159 - skipped

SEQ ID NO: 160 - protein, 242 aa, synthetic construct
  REGION 1..242: note = source = /note="Description of Artificial Sequence: Synthetic polypeptide"
DIQMTQTTSSLSASLGDRVTISCRASQDISKYLNWYQQKPDGTVKLLIYHTSRLHSGVPSRFSGSGSGTDYSLTISNLEQEDIATYFCQQGNTLPYTFGGGTKLEITGGGGSGGGGSGGGGSEVKLQESGPGLVAPSQSLSVTCTVSGVSLPDYGVSWIRQPPRKGLEWLGVIWGSETTYYNSALKSRLTIIKDNSKSQVFLKMNSLQTDDTAIYYCAKHYYYGGSYAMDYWGQGTSVTVSS

SEQ ID NO: 161 - protein, 242 aa, synthetic construct
  REGION 1..242: note = source = /note="Description of Artificial Sequence: Synthetic polypeptide"
EIVMTQSPATLSLSPGERATLSCRASQDISKYLNWYQQKPGQAPRLLIYHTSRLHSGIPARFSGSGSGTDYTLTISSLQPEDFAVYFCQQGNTLPYTFGQGTKLEIKGGGGSGGGGSGGGGSQVQLQESGPGLVKPSETLSLTCTVSGVSLPDYGVSWIRQPPGKGLEWIGVIWGSETTYYSSSLKSRVTISKDNSKNQVSLKLSSVTAADTAVYYCAKHYYYGGSYAMDYWGQGTLVTVSS

SEQ ID NO: 162 - protein, 242 aa, synthetic construct
  REGION 1..242: note = source = /note="Description of Artificial Sequence: Synthetic polypeptide"
EIVMTQSPATLSLSPGERATLSCRASQDISKYLNWYQQKPGQAPRLLIYHTSRLHSGIPARFSGSGSGTDYTLTISSLQPEDFAVYFCQQGNTLPYTFGQGTKLEIKGGGGSGGGGSGGGGSQVQLQESGPGLVKPSETLSLTCTVSGVSLPDYGVSWIRQPPGKGLEWIGVIWGSETTYYQSSLKSRVTISKDNSKNQVSLKLSSVTAADTAVYYCAKHYYYGGSYAMDYWGQGTLVTVSS

SEQ ID NO: 163 - protein, 242 aa, synthetic construct
  REGION 1..242: note = source = /note="Description of Artificial Sequence: Synthetic polypeptide"
QVQLQESGPGLVKPSETLSLTCTVSGVSLPDYGVSWIRQPPGKGLEWIGVIWGSETTYYSSSLKSRVTISKDNSKNQVSLKLSSVTAADTAVYYCAKHYYYGGSYAMDYWGQGTLVTVSSGGGGSGGGGSGGGGSEIVMTQSPATLSLSPGERATLSCRASQDISKYLNWYQQKPGQAPRLLIYHTSRLHSGIPARFSGSGSGTDYTLTISSLQPEDFAVYFCQQGNTLPYTFGQGTKLEIK

SEQ ID NO: 164 - protein, 242 aa, synthetic construct
  REGION 1..242: note = source = /note="Description of Artificial Sequence: Synthetic polypeptide"
QVQLQESGPGLVKPSETLSLTCTVSGVSLPDYGVSWIRQPPGKGLEWIGVIWGSETTYYQSSLKSRVTISKDNSKNQVSLKLSSVTAADTAVYYCAKHYYYGGSYAMDYWGQGTLVTVSSGGGGSGGGGSGGGGSEIVMTQSPATLSLSPGERATLSCRASQDISKYLNWYQQKPGQAPRLLIYHTSRLHSGIPARFSGSGSGTDYTLTISSLQPEDFAVYFCQQGNTLPYTFGQGTKLEIK

SEQ ID NO: 165 - protein, 247 aa, synthetic construct
  REGION 1..247: note = source = /note="Description of Artificial Sequence: Synthetic polypeptide"
EIVMTQSPATLSLSPGERATLSCRASQDISKYLNWYQQKPGQAPRLLIYHTSRLHSGIPARFSGSGSGTDYTLTISSLQPEDFAVYFCQQGNTLPYTFGQGTKLEIKGGGGSGGGGSGGGGSGGGGSQVQLQESGPGLVKPSETLSLTCTVSGVSLPDYGVSWIRQPPGKGLEWIGVIWGSETTYYSSSLKSRVTISKDNSKNQVSLKLSSVTAADTAVYYCAKHYYYGGSYAMDYWGQGTLVTVSS

SEQ ID NO: 166 - protein, 247 aa, synthetic construct
  REGION 1..247: note = source = /note="Description of Artificial Sequence: Synthetic polypeptide"
EIVMTQSPATLSLSPGERATLSCRASQDISKYLNWYQQKPGQAPRLLIYHTSRLHSGIPARFSGSGSGTDYTLTISSLQPEDFAVYFCQQGNTLPYTFGQGTKLEIKGGGGSGGGGSGGGGSGGGGSQVQLQESGPGLVKPSETLSLTCTVSGVSLPDYGVSWIRQPPGKGLEWIGVIWGSETTYYQSSLKSRVTISKDNSKNQVSLKLSSVTAADTAVYYCAKHYYYGGSYAMDYWGQGTLVTVSS

SEQ ID NO: 167 - protein, 247 aa, synthetic construct
  REGION 1..247: note = source = /note="Description of Artificial Sequence: Synthetic polypeptide"
QVQLQESGPGLVKPSETLSLTCTVSGVSLPDYGVSWIRQPPGKGLEWIGVIWGSETTYYSSSLKSRVTISKDNSKNQVSLKLSSVTAADTAVYYCAKHYYYGGSYAMDYWGQGTLVTVSSGGGGSGGGGSGGGGSGGGGSEIVMTQSPATLSLSPGERATLSCRASQDISKYLNWYQQKPGQAPRLLIYHTSRLHSGIPARFSGSGSGTDYTLTISSLQPEDFAVYFCQQGNTLPYTFGQGTKLEIK

SEQ ID NO: 168 - protein, 247 aa, synthetic construct
  REGION 1..247: note = source = /note="Description of Artificial Sequence: Synthetic polypeptide"
QVQLQESGPGLVKPSETLSLTCTVSGVSLPDYGVSWIRQPPGKGLEWIGVIWGSETTYYQSSLKSRVTISKDNSKNQVSLKLSSVTAADTAVYYCAKHYYYGGSYAMDYWGQGTLVTVSSGGGGSGGGGSGGGGSGGGGSEIVMTQSPATLSLSPGERATLSCRASQDISKYLNWYQQKPGQAPRLLIYHTSRLHSGIPARFSGSGSGTDYTLTISSLQPEDFAVYFCQQGNTLPYTFGQGTKLEIK

SEQ ID NO: 169 - protein, 247 aa, synthetic construct
  REGION 1..247: note = source = /note="Description of Artificial Sequence: Synthetic polypeptide"
EIVMTQSPATLSLSPGERATLSCRASQDISKYLNWYQQKPGQAPRLLIYHTSRLHSGIPARFSGSGSGTDYTLTISSLQPEDFAVYFCQQGNTLPYTFGQGTKLEIKGGGGSGGGGSGGGGSGGGGSQVQLQESGPGLVKPSETLSLTCTVSGVSLPDYGVSWIRQPPGKGLEWIGVIWGSETTYYNSSLKSRVTISKDNSKNQVSLKLSSVTAADTAVYYCAKHYYYGGSYAMDYWGQGTLVTVSS

SEQ ID NO: 170 - protein, 247 aa, synthetic construct
  REGION 1..247: note = source = /note="Description of Artificial Sequence: Synthetic polypeptide"
QVQLQESGPGLVKPSETLSLTCTVSGVSLPDYGVSWIRQPPGKGLEWIGVIWGSETTYYNSSLKSRVTISKDNSKNQVSLKLSSVTAADTAVYYCAKHYYYGGSYAMDYWGQGTLVTVSSGGGGSGGGGSGGGGSGGGGSEIVMTQSPATLSLSPGERATLSCRASQDISKYLNWYQQKPGQAPRLLIYHTSRLHSGIPARFSGSGSGTDYTLTISSLQPEDFAVYFCQQGNTLPYTFGQGTKLEIK

SEQ ID NO: 171 - protein, 242 aa, synthetic construct
  REGION 1..242: note = source = /note="Description of Artificial Sequence: Synthetic polypeptide"
EIVMTQSPATLSLSPGERATLSCRASQDISKYLNWYQQKPGQAPRLLIYHTSRLHSGIPARFSGSGSGTDYTLTISSLQPEDFAVYFCQQGNTLPYTFGQGTKLEIKGGGGSGGGGSGGGGSQVQLQESGPGLVKPSETLSLTCTVSGVSLPDYGVSWIRQPPGKGLEWIGVIWGSETTYYNSSLKSRVTISKDNSKNQVSLKLSSVTAADTAVYYCAKHYYYGGSYAMDYWGQGTLVTVSS

SEQ ID NO: 172 - protein, 242 aa, synthetic construct
  REGION 1..242: note = source = /note="Description of Artificial Sequence: Synthetic polypeptide"
QVQLQESGPGLVKPSETLSLTCTVSGVSLPDYGVSWIRQPPGKGLEWIGVIWGSETTYYNSSLKSRVTISKDNSKNQVSLKLSSVTAADTAVYYCAKHYYYGGSYAMDYWGQGTLVTVSSGGGGSGGGGSGGGGSEIVMTQSPATLSLSPGERATLSCRASQDISKYLNWYQQKPGQAPRLLIYHTSRLHSGIPARFSGSGSGTDYTLTISSLQPEDFAVYFCQQGNTLPYTFGQGTKLEIK

SEQ ID NO: 173 - protein, 119 aa, synthetic construct
  REGION 1..119: note = source = /note="Description of Artificial Sequence: Synthetic polypeptide"
QVQLLESGAELVRPGSSVKISCKASGYAFSSYWMNWVKQRPGQGLEWIGQIYPGDGDTNYNGKFKGQATLTADKSSSTAYMQLSGLTSEDSAVYSCARKTISSVVDFYFDYWGQGTTVT

SEQ ID NO: 174 - protein, 111 aa, synthetic construct
  REGION 1..111: note = source = /note="Description of Artificial Sequence: Synthetic polypeptide"
ELVLTQSPKFMSTSVGDRVSVTCKASQNVGTNVAWYQQKPGQSPKPLIYSATYRNSGVPDRFTGSGSGTDFTLTITNVQSKDLADYFYFCQYNRYPYTSGGGTKLEIKRRS

SEQ ID NO: 175 - protein, 248 aa, synthetic construct
  REGION 1..248: note = source = /note="Description of Artificial Sequence: Synthetic polypeptide"
QVQLLESGAELVRPGSSVKISCKASGYAFSSYWMNWVKQRPGQGLEWIGQIYPGDGDTNYNGKFKGQATLTADKSSSTAYMQLSGLTSEDSAVYSCARKTISSVVDFYFDYWGQGTTVTGSTSGSGKPGSGEGSTKGELVLTQSPKFMSTSVGDRVSVTCKASQNVGTNVAWYQQKPGQSPKPLIYSATYRNSGVPDRFTGSGSGTDFTLTITNVQSKDLADYFYFCQYNRYPYTSGGGTKLEIKRRS

SEQ ID NO: 176 - protein, 10 aa, synthetic construct
  REGION 1..10: note = source = /note="Description of Artificial Sequence: Synthetic peptide"
GVSLPDYGVS

SEQ ID NO: 177 - protein, 16 aa, synthetic construct
  REGION 1..16: note = source = /note="Description of Artificial Sequence: Synthetic peptide"
VIWGSETTYYNSALKS

SEQ ID NO: 178 - protein, 16 aa, synthetic construct
  REGION 1..16: note = source = /note="Description of Artificial Sequence: Synthetic peptide"
VIWGSETTYYSSSLKS

SEQ ID NO: 179 - protein, 16 aa, synthetic construct
  REGION 1..16: note = source = /note="Description of Artificial Sequence: Synthetic peptide"
VIWGSETTYYQSSLKS

SEQ ID NO: 180 - protein, 16 aa, synthetic construct
  REGION 1..16: note = source = /note="Description of Artificial Sequence: Synthetic peptide"
VIWGSETTYYNSSLKS

SEQ ID NO: 181 - protein, 12 aa, synthetic construct
  REGION 1..12: note = source = /note="Description of Artificial Sequence: Synthetic peptide"
HYYYGGSYAMDY

SEQ ID NO: 182 - protein, 11 aa, synthetic construct
  REGION 1..11: note = source = /note="Description of Artificial Sequence: Synthetic peptide"
RASQDISKYLN

SEQ ID NO: 183 - protein, 7 aa, synthetic construct
  REGION 1..7: note = source = /note="Description of Artificial Sequence: Synthetic peptide"
HTSRLHS

SEQ ID NO: 184 - protein, 9 aa, synthetic construct
  REGION 1..9: note = source = /note="Description of Artificial Sequence: Synthetic peptide"
QQGNTLPYT

SEQ ID NO: 185 - protein, 486 aa, synthetic construct
  REGION 1..486: note = source = /note="Description of Artificial Sequence: Synthetic polypeptide"
MALPVTALLLPLALLLHAARPDIQMTQTTSSLSASLGDRVTISCRASQDISKYLNWYQQKPDGTVKLLIYHTSRLHSGVPSRFSGSGSGTDYSLTISNLEQEDIATYFCQQGNTLPYTFGGGTKLEITGGGGSGGGGSGGGGSEVKLQESGPGLVAPSQSLSVTCTVSGVSLPDYGVSWIRQPPRKGLEWLGVIWGSETTYYNSALKSRLTIIKDNSKSQVFLKMNSLQTDDTAIYYCAKHYYYGGSYAMDYWGQGTSVTVSSTTTPAPRPPTPAPTIASQPLSLRPEACRPAAGGAVHTRGLDFACDIYIWAPLAGTCGVLLLSLVITLYCKRGRKKLLYIFKQPFMRPVQTTQEEDGCSCRFPEEEEGGCELRVKFSRSADAPAYKQGQNQLYNELNLGRREEYDVLDKRRGRDPEMGGKPRRKNPQEGLYNELQKDKMAEAYSEIGMKGERRRGKGHDGLYQGLSTATKDTYDALHMQALPPR

SEQ ID NO: 186 - protein, 486 aa, synthetic construct
  REGION 1..486: note = source = /note="Description of Artificial Sequence: Synthetic polypeptide"
MALPVTALLLPLALLLHAARPEIVMTQSPATLSLSPGERATLSCRASQDISKYLNWYQQKPGQAPRLLIYHTSRLHSGIPARFSGSGSGTDYTLTISSLQPEDFAVYFCQQGNTLPYTFGQGTKLEIKGGGGSGGGGSGGGGSQVQLQESGPGLVKPSETLSLTCTVSGVSLPDYGVSWIRQPPGKGLEWIGVIWGSETTYYSSSLKSRVTISKDNSKNQVSLKLSSVTAADTAVYYCAKHYYYGGSYAMDYWGQGTLVTVSSTTTPAPRPPTPAPTIASQPLSLRPEACRPAAGGAVHTRGLDFACDIYIWAPLAGTCGVLLLSLVITLYCKRGRKKLLYIFKQPFMRPVQTTQEEDGCSCRFPEEEEGGCELRVKFSRSADAPAYKQGQNQLYNELNLGRREEYDVLDKRRGRDPEMGGKPRRKNPQEGLYNELQKDKMAEAYSEIGMKGERRRGKGHDGLYQGLSTATKDTYDALHMQALPPR

SEQ ID NO: 187 - protein, 486 aa, synthetic construct
  REGION 1..486: note = source = /note="Description of Artificial Sequence: Synthetic polypeptide"
MALPVTALLLPLALLLHAARPEIVMTQSPATLSLSPGERATLSCRASQDISKYLNWYQQKPGQAPRLLIYHTSRLHSGIPARFSGSGSGTDYTLTISSLQPEDFAVYFCQQGNTLPYTFGQGTKLEIKGGGGSGGGGSGGGGSQVQLQESGPGLVKPSETLSLTCTVSGVSLPDYGVSWIRQPPGKGLEWIGVIWGSETTYYQSSLKSRVTISKDNSKNQVSLKLSSVTAADTAVYYCAKHYYYGGSYAMDYWGQGTLVTVSSTTTPAPRPPTPAPTIASQPLSLRPEACRPAAGGAVHTRGLDFACDIYIWAPLAGTCGVLLLSLVITLYCKRGRKKLLYIFKQPFMRPVQTTQEEDGCSCRFPEEEEGGCELRVKFSRSADAPAYKQGQNQLYNELNLGRREEYDVLDKRRGRDPEMGGKPRRKNPQEGLYNELQKDKMAEAYSEIGMKGERRRGKGHDGLYQGLSTATKDTYDALHMQALPPR

SEQ ID NO: 188 - protein, 486 aa, synthetic construct
  REGION 1..486: note = source = /note="Description of Artificial Sequence: Synthetic polypeptide"
MALPVTALLLPLALLLHAARPQVQLQESGPGLVKPSETLSLTCTVSGVSLPDYGVSWIRQPPGKGLEWIGVIWGSETTYYSSSLKSRVTISKDNSKNQVSLKLSSVTAADTAVYYCAKHYYYGGSYAMDYWGQGTLVTVSSGGGGSGGGGSGGGGSEIVMTQSPATLSLSPGERATLSCRASQDISKYLNWYQQKPGQAPRLLIYHTSRLHSGIPARFSGSGSGTDYTLTISSLQPEDFAVYFCQQGNTLPYTFGQGTKLEIKTTTPAPRPPTPAPTIASQPLSLRPEACRPAAGGAVHTRGLDFACDIYIWAPLAGTCGVLLLSLVITLYCKRGRKKLLYIFKQPFMRPVQTTQEEDGCSCRFPEEEEGGCELRVKFSRSADAPAYKQGQNQLYNELNLGRREEYDVLDKRRGRDPEMGGKPRRKNPQEGLYNELQKDKMAEAYSEIGMKGERRRGKGHDGLYQGLSTATKDTYDALHMQALPPR

SEQ ID NO: 189 - protein, 486 aa, synthetic construct
  REGION 1..486: note = source = /note="Description of Artificial Sequence: Synthetic polypeptide"
MALPVTALLLPLALLLHAARPQVQLQESGPGLVKPSETLSLTCTVSGVSLPDYGVSWIRQPPGKGLEWIGVIWGSETTYYQSSLKSRVTISKDNSKNQVSLKLSSVTAADTAVYYCAKHYYYGGSYAMDYWGQGTLVTVSSGGGGSGGGGSGGGGSEIVMTQSPATLSLSPGERATLSCRASQDISKYLNWYQQKPGQAPRLLIYHTSRLHSGIPARFSGSGSGTDYTLTISSLQPEDFAVYFCQQGNTLPYTFGQGTKLEIKTTTPAPRPPTPAPTIASQPLSLRPEACRPAAGGAVHTRGLDFACDIYIWAPLAGTCGVLLLSLVITLYCKRGRKKLLYIFKQPFMRPVQTTQEEDGCSCRFPEEEEGGCELRVKFSRSADAPAYKQGQNQLYNELNLGRREEYDVLDKRRGRDPEMGGKPRRKNPQEGLYNELQKDKMAEAYSEIGMKGERRRGKGHDGLYQGLSTATKDTYDALHMQALPPR

SEQ ID NO: 190 - protein, 491 aa, synthetic construct
  REGION 1..491: note = source = /note="Description of Artificial Sequence: Synthetic polypeptide"
MALPVTALLLPLALLLHAARPEIVMTQSPATLSLSPGERATLSCRASQDISKYLNWYQQKPGQAPRLLIYHTSRLHSGIPARFSGSGSGTDYTLTISSLQPEDFAVYFCQQGNTLPYTFGQGTKLEIKGGGGSGGGGSGGGGSGGGGSQVQLQESGPGLVKPSETLSLTCTVSGVSLPDYGVSWIRQPPGKGLEWIGVIWGSETTYYSSSLKSRVTISKDNSKNQVSLKLSSVTAADTAVYYCAKHYYYGGSYAMDYWGQGTLVTVSSTTTPAPRPPTPAPTIASQPLSLRPEACRPAAGGAVHTRGLDFACDIYIWAPLAGTCGVLLLSLVITLYCKRGRKKLLYIFKQPFMRPVQTTQEEDGCSCRFPEEEEGGCELRVKFSRSADAPAYKQGQNQLYNELNLGRREEYDVLDKRRGRDPEMGGKPRRKNPQEGLYNELQKDKMAEAYSEIGMKGERRRGKGHDGLYQGLSTATKDTYDALHMQALPPR

SEQ ID NO: 191 - protein, 491 aa, synthetic construct
  REGION 1..491: note = source = /note="Description of Artificial Sequence: Synthetic polypeptide"
MALPVTALLLPLALLLHAARPEIVMTQSPATLSLSPGERATLSCRASQDISKYLNWYQQKPGQAPRLLIYHTSRLHSGIPARFSGSGSGTDYTLTISSLQPEDFAVYFCQQGNTLPYTFGQGTKLEIKGGGGSGGGGSGGGGSGGGGSQVQLQESGPGLVKPSETLSLTCTVSGVSLPDYGVSWIRQPPGKGLEWIGVIWGSETTYYQSSLKSRVTISKDNSKNQVSLKLSSVTAADTAVYYCAKHYYYGGSYAMDYWGQGTLVTVSSTTTPAPRPPTPAPTIASQPLSLRPEACRPAAGGAVHTRGLDFACDIYIWAPLAGTCGVLLLSLVITLYCKRGRKKLLYIFKQPFMRPVQTTQEEDGCSCRFPEEEEGGCELRVKFSRSADAPAYKQGQNQLYNELNLGRREEYDVLDKRRGRDPEMGGKPRRKNPQEGLYNELQKDKMAEAYSEIGMKGERRRGKGHDGLYQGLSTATKDTYDALHMQALPPR

SEQ ID NO: 192 - protein, 491 aa, synthetic construct
  REGION 1..491: note = source = /note="Description of Artificial Sequence: Synthetic polypeptide"
MALPVTALLLPLALLLHAARPQVQLQESGPGLVKPSETLSLTCTVSGVSLPDYGVSWIRQPPGKGLEWIGVIWGSETTYYSSSLKSRVTISKDNSKNQVSLKLSSVTAADTAVYYCAKHYYYGGSYAMDYWGQGTLVTVSSGGGGSGGGGSGGGGSGGGGSEIVMTQSPATLSLSPGERATLSCRASQDISKYLNWYQQKPGQAPRLLIYHTSRLHSGIPARFSGSGSGTDYTLTISSLQPEDFAVYFCQQGNTLPYTFGQGTKLEIKTTTPAPRPPTPAPTIASQPLSLRPEACRPAAGGAVHTRGLDFACDIYIWAPLAGTCGVLLLSLVITLYCKRGRKKLLYIFKQPFMRPVQTTQEEDGCSCRFPEEEEGGCELRVKFSRSADAPAYKQGQNQLYNELNLGRREEYDVLDKRRGRDPEMGGKPRRKNPQEGLYNELQKDKMAEAYSEIGMKGERRRGKGHDGLYQGLSTATKDTYDALHMQALPPR

SEQ ID NO: 193 - protein, 491 aa, synthetic construct
  REGION 1..491: note = source = /note="Description of Artificial Sequence: Synthetic polypeptide"
MALPVTALLLPLALLLHAARPQVQLQESGPGLVKPSETLSLTCTVSGVSLPDYGVSWIRQPPGKGLEWIGVIWGSETTYYQSSLKSRVTISKDNSKNQVSLKLSSVTAADTAVYYCAKHYYYGGSYAMDYWGQGTLVTVSSGGGGSGGGGSGGGGSGGGGSEIVMTQSPATLSLSPGERATLSCRASQDISKYLNWYQQKPGQAPRLLIYHTSRLHSGIPARFSGSGSGTDYTLTISSLQPEDFAVYFCQQGNTLPYTFGQGTKLEIKTTTPAPRPPTPAPTIASQPLSLRPEACRPAAGGAVHTRGLDFACDIYIWAPLAGTCGVLLLSLVITLYCKRGRKKLLYIFKQPFMRPVQTTQEEDGCSCRFPEEEEGGCELRVKFSRSADAPAYKQGQNQLYNELNLGRREEYDVLDKRRGRDPEMGGKPRRKNPQEGLYNELQKDKMAEAYSEIGMKGERRRGKGHDGLYQGLSTATKDTYDALHMQALPPR

SEQ ID NO: 194 - protein, 491 aa, synthetic construct
  REGION 1..491: note = source = /note="Description of Artificial Sequence: Synthetic polypeptide"
MALPVTALLLPLALLLHAARPEIVMTQSPATLSLSPGERATLSCRASQDISKYLNWYQQKPGQAPRLLIYHTSRLHSGIPARFSGSGSGTDYTLTISSLQPEDFAVYFCQQGNTLPYTFGQGTKLEIKGGGGSGGGGSGGGGSGGGGSQVQLQESGPGLVKPSETLSLTCTVSGVSLPDYGVSWIRQPPGKGLEWIGVIWGSETTYYNSSLKSRVTISKDNSKNQVSLKLSSVTAADTAVYYCAKHYYYGGSYAMDYWGQGTLVTVSSTTTPAPRPPTPAPTIASQPLSLRPEACRPAAGGAVHTRGLDFACDIYIWAPLAGTCGVLLLSLVITLYCKRGRKKLLYIFKQPFMRPVQTTQEEDGCSCRFPEEEEGGCELRVKFSRSADAPAYKQGQNQLYNELNLGRREEYDVLDKRRGRDPEMGGKPRRKNPQEGLYNELQKDKMAEAYSEIGMKGERRRGKGHDGLYQGLSTATKDTYDALHMQALPPR

SEQ ID NO: 195 - protein, 491 aa, synthetic construct; identical to SEQ ID NO: 194
  REGION 1..491: note = source = /note="Description of Artificial Sequence: Synthetic polypeptide"

SEQ ID NO: 196 - protein, 491 aa, synthetic construct
  REGION 1..491: note = source = /note="Description of Artificial Sequence: Synthetic polypeptide"
MALPVTALLLPLALLLHAARPQVQLQESGPGLVKPSETLSLTCTVSGVSLPDYGVSWIRQPPGKGLEWIGVIWGSETTYYNSSLKSRVTISKDNSKNQVSLKLSSVTAADTAVYYCAKHYYYGGSYAMDYWGQGTLVTVSSGGGGSGGGGSGGGGSGGGGSEIVMTQSPATLSLSPGERATLSCRASQDISKYLNWYQQKPGQAPRLLIYHTSRLHSGIPARFSGSGSGTDYTLTISSLQPEDFAVYFCQQGNTLPYTFGQGTKLEIKTTTPAPRPPTPAPTIASQPLSLRPEACRPAAGGAVHTRGLDFACDIYIWAPLAGTCGVLLLSLVITLYCKRGRKKLLYIFKQPFMRPVQTTQEEDGCSCRFPEEEEGGCELRVKFSRSADAPAYKQGQNQLYNELNLGRREEYDVLDKRRGRDPEMGGKPRRKNPQEGLYNELQKDKMAEAYSEIGMKGERRRGKGHDGLYQGLSTATKDTYDALHMQALPPR

SEQ ID NO: 197 - protein, 486 aa, synthetic construct
  REGION 1..486: note = source = /note="Description of Artificial Sequence: Synthetic polypeptide"
MALPVTALLLPLALLLHAARPEIVMTQSPATLSLSPGERATLSCRASQDISKYLNWYQQKPGQAPRLLIYHTSRLHSGIPARFSGSGSGTDYTLTISSLQPEDFAVYFCQQGNTLPYTFGQGTKLEIKGGGGSGGGGSGGGGSQVQLQESGPGLVKPSETLSLTCTVSGVSLPDYGVSWIRQPPGKGLEWIGVIWGSETTYYNSSLKSRVTISKDNSKNQVSLKLSSVTAADTAVYYCAKHYYYGGSYAMDYWGQGTLVTVSSTTTPAPRPPTPAPTIASQPLSLRPEACRPAAGGAVHTRGLDFACDIYIWAPLAGTCGVLLLSLVITLYCKRGRKKLLYIFKQPFMRPVQTTQEEDGCSCRFPEEEEGGCELRVKFSRSADAPAYKQGQNQLYNELNLGRREEYDVLDKRRGRDPEMGGKPRRKNPQEGLYNELQKDKMAEAYSEIGMKGERRRGKGHDGLYQGLSTATKDTYDALHMQALPPR

SEQ ID NO: 198-238 - skipped (41 entries)

SEQ ID NO: 239 - protein, 246 aa, synthetic construct
  REGION 1..246: note = source = /note="Description of Artificial Sequence: Synthetic polypeptide"
QVQLVESGGGLVQPGRSLRLSCAASGFTFSNYAMSWVRQAPGKGLGWVSGISRSGENTYYADSVKGRFTISRDNSKNTLYLQMNSLRDEDTAVYYCARSPAHYYGGMDVWGQGTTVTVSSASGGGGSGGRASGGGGSDIVLTQSPGTLSLSPGERATLSCRASQSISSSFLAWYQQKPGQAPRLLIYGASRRATGIPDRFSGSGSGTDFTLTISRLEPEDSAVYYCQQYHSSPSWTFGQGTKLEIK

SEQ ID NO: 240 - protein, 244 aa, synthetic construct
  REGION 1..244: note = source = /note="Description of Artificial Sequence: Synthetic polypeptide"
QVQLVESGGGLVQPGRSLRLSCAASGFTFDDYAMHWVRQAPGKGLEWVSGISWNSGSIGYADSVKGRFTISRDNAKNSLYLQMNSLRAEDTALYYCSVHSFLAYWGQGTLVTVSSASGGGGSGGRASGGGGSDIVMTQTPLSLPVTPGEPASISCRSSQSLLHSNGYNYLDWYLQKPGQSPQLLIYLGSNRASGVPDRFSGSGSGTDFTLKISRVEAEDVGVYYCMQALQTPYTFGQGTKVEIK

SEQ ID NO: 241 - protein, 243 aa, synthetic construct
  REGION 1..243: note = source = /note="Description of Artificial Sequence: Synthetic polypeptide"
EVQLLESGGGLVQPGGSLRLSCAVSGFALSNHGMSWVRRAPGKGLEWVSGIVYSGSTYYAASVKGRFTISRDNSRNTLYLQMNSLRPEDTAIYYCSAHGGESDVWGQGTTVTVSSASGGGGSGGRASGGGGSDIVMTQTPLSLSVTPGQPASISCKSSQSLLRNDGKTPLYWYLQKAGQPPQLLIYEVSNRFSGVPDRFSGSGSGTDFTLKISRVEAEDVGAYYCMQNIQFPSFGGGTKLEIK

SEQ ID NO: 242 - protein, 249 aa, synthetic construct
  REGION 1..249: note = source = /note="Description of Artificial Sequence: Synthetic polypeptide"
QVQLVQSGAEVRKTGASVKVSCKASGYIFDNFGINWVRQAPGQGLEWMGWINPKNNNTNYAQKFQGRVTITADESTNTAYMEVSSLRSEDTAVYYCARGPYYYQSYMDVWGQGTMVTVSSASGGGGSGGRASGGGGSDIVMTQTPLSLPVTPGEPASISCRSSQSLLHSNGYNYLNWYLQKPGQSPQLLIYLGSKRASGVPDRFSGSGSGTDFTLHITRVGAEDVGVYYCMQALQTPYTFGQGTKLEIK

SEQ ID NO: 243 - protein, 246 aa, synthetic construct
  REGION 1..246: note = source = /note="Description of Artificial Sequence: Synthetic polypeptide"
QVQLQESGGGLVQPGGSLRLSCAASGFTFSSDAMTWVRQAPGKGLEWVSVISGSGGTTYYADSVKGRFTISRDNSKNTLYLQMNSLRAEDTAVYYCAKLDSSGYYYARGPRYWGQGTLVTVSSASGGGGSGGRASGGGGSDIQLTQSPSSLSASVGDRVTITCRASQSISSYLNWYQQKPGKAPKLLIYGASTLASGVPARFSGSGSGTHFTLTINSLQSEDSATYYCQQSYKRASFGQGTKVEIK

SEQ ID NO: 244 - protein, 247 aa, synthetic construct
  REGION 1..247: note = source = /note="Description of Artificial Sequence: Synthetic polypeptide"
QVQLVQSGAEVKKPGASVKVSCKASGYTFSNYGITWVRQAPGQGLEWMGWISAYNGNTNYAQKFQGRVTMTRNTSISTAYMELSSLRSEDTAVYYCARGPYYYYMDVWGKGTMVTVSSASGGGGSGGRASGGGGSEIVMTQSPLSLPVTPGEPASISCRSSQSLLYSNGYNYVDWYLQKPGQSPQLLIYLGSNRASGVPDRFSGSGSGTDFKLQISRVEAEDVGIYYCMQGRQFPYSFGQGTKVEIK

SEQ ID NO: 245 - protein, 238 aa, synthetic construct
  REGION 1..238: note = source = /note="Description of Artificial Sequence: Synthetic polypeptide"
EVQLLETGGGLVQPGGSLRLSCAVSGFALSNHGMSWVRRAPGKGLEWVSGIVYSGSTYYAASVKGRFTISRDNSRNTLYLQMNSLRPEDTAIYYCSAHGGESDVWGQGTTVTVSSASGGGGSGGRASGGGGSEIVLTQSPATLSVSPGESATLSCRASQSVSSNLAWYQQKPGQAPRLLIYGASTRASGIPDRFSGSGSGTDFTLTISSLQAEDVAVYYCQQYGSSLTFGGGTKVEIK

SEQ ID NO: 246 - protein, 239 aa, synthetic construct
  REGION 1..239: note = source = /note="Description of Artificial Sequence: Synthetic polypeptide"
EVQLVETGGGLVQPGGSLRLSCAVSGFALSNHGMSWVRRAPGKGLEWVSGIVYSGSTYYAASVKGRFTISRDNSRNTLYLQMNSLRPEDTAIYYCSAHGGESDVWGQGTTVTVSSASGGGGSGGRASGGGGSEIVMTQSPATLSVSPGERATLSCRASQSVSSKLAWYQQKPGQAPRLLMYGASIRATGIPDRFSGSGSGTEFTLTISSLEPEDFAVYYCQQYGSSSWTFGQGTKVEIK

SEQ ID NO: 247 - protein, 241 aa, synthetic construct
  REGION 1..241: note = source = /note="Description of Artificial Sequence: Synthetic polypeptide"
EVQLVETGGGVVQPGGSLRLSCAVSGFALSNHGMSWVRRAPGKGLEWVSGIVYSGSTYYAASVKGRFTISRDNSRNTLYLQMNSLRPEDTAIYYCSAHGGESDVWGQGTTVTVSSASGGGGSGGRASGGGGSEIVLTQSPGTLSLSPGERATLSCRASQSVGSTNLAWYQQKPGQAPRLLIYDASNRATGIPDRFSGGGSGTDFTLTISRLEPEDFAVYYCQQYGSSPPWTFGQGTKVEIK

SEQ ID NO: 248 - protein, 239 aa, synthetic construct
  REGION 1..239: note = source = /note="Description of Artificial Sequence: Synthetic polypeptide"
QVQLVESGGGLVKPGGSLRLSCAASGFTFSDYYMSWIRQAPGKGLEWVSYISSSGSTIYYADSVKGRFTISRDNAKNSLYLQMNSLRAEDTAVYYCARESGDGMDVWGQGTTVTVSSASGGGGSGGRASGGGGSDIQMTQSPSSLSASVGDRVTITCRASQSISSYLNWYQQKPGKAPKLLIYAASSLQSGVPSRFSGSGSGTDFTLTISSLQPEDFATYYCQQSYTLAFGQGTKVDIK

SEQ ID NO: 249 - protein, 239 aa, synthetic construct
  REGION 1..239: note = source = /note="Description of Artificial Sequence: Synthetic polypeptide"
EVQLVESGGGLVQPGGSLRLSCAVSGFALSNHGMSWVRRAPGKGLEWVSGIVYSGSTYYAASVKGRFTISRDNSRNTLYLQMNSLRPEDTAIYYCSAHGGESDVWGQGTTVTVSSASGGGGSGGRASGGGGSDIQLTQSPSSLSASVGDRVTITCRASQSISSYLNWYQQKPGKAPKLLIYAASSLQSGVPSRFSGSGSGTDFTLTISSLQPEDFATYYCQQSYSTPYTFGQGTKVEIK

SEQ ID NO: 250 - protein, 246 aa, synthetic construct
  REGION 1..246: note = source = /note="Description of Artificial Sequence: Synthetic polypeptide"
QVQLVQSGGGLVKPGGSLRLSCAASGFTFSDYYMSWIRQAPGKGLEWVSYISSSGNTIYYADSVKGRFTISRDNAKNSLYLQMNSLRAEDTAVYYCARSTMVREDYWGQGTLVTVSSASGGGGSGGRASGGGGSDIVLTQSPLSLPVTLGQPASISCKSSESLVHNSGKTYLNWFHQRPGQSPRRLIYEVSNRDSGVPDRFTGSGSGTDFTLKISRVEAEDVGVYYCMQGTHWPGTFGQGTKLEIK

SEQ ID NO: 251 - protein, 239 aa, synthetic construct
  REGION 1..239: note = source = /note="Description of Artificial Sequence: Synthetic polypeptide"
QVQLVESGGGLVQPGGSLRLSCAVSGFALSNHGMSWVRRAPGKGLEWVSGIVYSGSTYYAASVKGRFTISRDNSRNTLYLQMNSLRPEDTAIYYCSAHGGESDVWGQGTTVTVSSASGGGGSGGRASGGGGSDIRLTQSPSPLSASVGDRVTITCQASEDINKFLNWYHQTPGKAPKLLIYDASTLQTGVPSRFSGSGSGTDFTLTINSLQPEDIGTYYCQQYESLPLTFGGGTKVEIK

SEQ ID NO: 252 - protein, 240 aa, synthetic construct
  REGION 1..240: note = source = /note="Description of Artificial Sequence: Synthetic polypeptide"
EVQLVETGGGLVQPGGSLRLSCAVSGFALSNHGMSWVRRAPGKGLEWVSGIVYSGSTYYAASVKGRFTISRDNSRNTLYLQMNSLRPEDTAIYYCSAHGGESDVWGQGTTVTVSSASGGGGSGGRASGGGGSETTLTQSPATLSVSPGERATLSCRASQSVGSNLAWYQQKPGQGPRLLIYGASTRATGIPARFSGSGSGTEFTLTISSLQPEDFAVYYCQQYNDWLPVTFGQGTKVEIK

SEQ ID NO: 253 - protein, 241 aa, synthetic construct
  REGION 1..241: note = source = /note="Description of Artificial Sequence: Synthetic polypeptide"
EVQLVESGGGLVQPGGSLRLSCAVSGFALSNHGMSWVRRAPGKGLEWVSGIVYSGSTYYAASVKGRFTISRDNSRNTLYLQMNSLRPEDTAIYYCSAHGGESDVWGQGTTVTVSSASGGGGSGGRASGGGGSEIVLTQSPGTLSLSPGERATLSCRASQSIGSSSLAWYQQKPGQAPRLLMYGASSRASGIPDRFSGSGSGTDFTLTISRLEPEDFAVYYCQQYAGSPPFTFGQGTKVEIK

SEQ ID NO: 254 - DNA, 738 bp, synthetic construct
  misc_feature 1..738: note = source = /note="Description of Artificial Sequence: Synthetic polynucleotide"
  source 1..738: mol_type = other DNA
caagtgcaactcgtggaatctggtggaggactcgtgcaacccggaagatcgcttagactgtcgtgtgccgccagcgggttcactttctcgaactacgcgatgtcctgggtccgccaggcacccggaaagggactcggttgggtgtccggcatttcccggtccggcgaaaatacctactacgccgactccgtgaagggccgcttcaccatctcaagggacaacagcaaaaacaccctgtacttgcaaatgaactccctgcgggatgaagatacagccgtgtactattgcgcccggtcgcctgcccattactacggcggaatggacgtctggggacagggaaccactgtgactgtcagcagcgcgtcgggtggcggcggctcagggggtcgggcctccggggggggagggtccgacatcgtgctgacccagtccccgggaaccctgagcctgagcccgggagagcgcgcgaccctgtcatgccgggcatcccagagcattagctcctcctttctcgcctggtatcagcagaagcccggacaggccccgaggctgctgatctacggcgctagcagaagggctaccggaatcccagaccggttctccggctccggttccgggaccgatttcacccttactatctcgcgcctggaacctgaggactccgccgtctactactgccagcagtaccactcatccccgtcgtggacgttcggacagggcaccaagctggagattaag

SEQ ID NO: 255 - DNA, 732 bp, synthetic construct
  misc_feature 1..732: note = source = /note="Description of Artificial Sequence: Synthetic polynucleotide"
  source 1..732: mol_type = other DNA
caagtgcaactcgtcgaatccggtggaggtctggtccaacctggtagaagcctgagactgtcgtgtgcggccagcggattcacctttgatgactatgctatgcactgggtgcggcaggccccaggaaagggcctggaatgggtgtcgggaattagctggaactccgggtccattggctacgccgactccgtgaagggccgcttcaccatctcccgcgacaacgcaaagaactccctgtacttgcaaatgaactcgctcagggctgaggataccgcgctgtactactgctccgtgcattccttcctggcctactggggacagggaactctggtcaccgtgtcgagcgcctccggcggcgggggctcgggtggacgggcctcgggcggaggggggtccgacatcgtgatgacccagaccccgctgagcttgcccgtgactcccggagagcctgcatccatctcctgccggtcatcccagtcccttctccactccaacggatacaactacctcgactggtacctccagaagccgggacagagccctcagcttctgatctacctggggtcaaatagagcctcaggagtgccggatcggttcagcggatctggttcgggaactgatttcactctgaagatttcccgcgtggaagccgaggacgtgggcgtctactactgtatgcaggcgctgcagaccccctataccttcggccaagggacgaaagtggagatcaag

SEQ ID NO: 256 - DNA, 729 bp, synthetic construct
  misc_feature 1..729: note = source = /note="Description of Artificial Sequence: Synthetic polynucleotide"
  source 1..729: mol_type = other DNA
gaagtgcaattgttggaatctggaggaggacttgtgcagcctggaggatcactgagactttcgtgtgcggtgtcaggcttcgccctgagcaaccacggcatgagctgggtgcggagagccccggggaagggtctggaatgggtgtccgggatcgtctactccggttcaacttactacgccgcaagcgtgaagggtcgcttcaccatttcccgcgataactcccggaacaccctgtacctccaaatgaactccctgcggcccgaggacaccgccatctactactgttccgcgcatggaggagagtccgatgtctggggacagggcactaccgtgaccgtgtcgagcgcctcggggggaggaggctccggcggtcgcgcctccggggggggtggcagcgacattgtgatgacgcagactccactctcgctgtccgtgaccccgggacagcccgcgtccatctcgtgcaagagctcccagagcctgctgaggaacgacggaaagactcctctgtattggtacctccagaaggctggacagcccccgcaactgctcatctacgaagtgtcaaatcgcttctccggggtgccggatcggttttccggctcgggatcgggcaccgacttcaccctgaaaatctccagggtcgaggccgaggacgtgggagcctactactgcatgcaaaacatccagttcccttccttcggcggcggcacaaagctggagattaag

SEQ ID NO: 257 - DNA, 747 bp, synthetic construct
  misc_feature 1..747: note = source = /note="Description of Artificial Sequence: Synthetic polynucleotide"
  source 1..747: mol_type = other DNA
caagtccaactcgtccagtccggcgcagaagtcagaaaaaccggtgctagcgtgaaagtgtcctgcaaggcctccggctacattttcgataacttcggaatcaactgggtcagacaggccccgggccaggggctggaatggatgggatggatcaaccccaagaacaacaacaccaactacgcacagaagttccagggccgcgtgactatcaccgccgatgaatcgaccaataccgcctacatggaggtgtcctccctgcggtcggaggacactgccgtgtattactgcgcgaggggcccatactactaccaaagctacatggacgtctggggacagggaaccatggtgaccgtgtcatccgcctccggtggtggaggctccggggggcgggcttcaggaggcggaggaagcgatattgtgatgacccagactccgcttagcctgcccgtgactcctggagaaccggcctccatttcctgccggtcctcgcaatcactcctgcattccaacggttacaactacctgaattggtacctccagaagcctggccagtcgccccagttgctgatctatctgggctcgaagcgcgcctccggggtgcctgaccggtttagcggatctgggagcggcacggacttcactctccacatcacccgcgtgggagcggaggacgtgggagtgtactactgtatgcaggcgctgcagactccgtacacattcggacagggcaccaagctggagatcaag

SEQ ID NO: 258 - DNA, 738 bp, synthetic construct
  misc_feature 1..738: note = source = /note="Description of Artificial Sequence: Synthetic polynucleotide"
  source 1..738: mol_type = other DNA
caagtgcaacttcaagaatcaggcggaggactcgtgcagcccggaggatcattgcggctctcgtgcgccgcctcgggcttcaccttctcgagcgacgccatgacctgggtccgccaggccccggggaaggggctggaatgggtgtctgtgatttccggctccgggggaactacgtactacgccgattccgtgaaaggtcgcttcactatctcccgggacaacagcaagaacaccctttatctgcaaatgaattccctccgcgccgaggacaccgccgtgtactactgcgccaagctggactcctcgggctactactatgcccggggtccgagatactggggacagggaaccctcgtgaccgtgtcctccgcgtccggcggaggagggtcgggagggcgggcctccggcggcggcggttcggacatccagctgacccagtccccatcctcactgagcgcaagcgtgggcgacagagtcaccattacatgcagggcgtcccagagcatcagctcctacctgaactggtaccaacagaagcctggaaaggctcctaagctgttgatctacggggcttcgaccctggcatccggggtgcccgcgaggtttagcggaagcggtagcggcactcacttcactctgaccattaacagcctccagtccgaggattcagccacttactactgtcagcagtcctacaagcgggccagcttcggacagggcactaaggtcgagatcaag

SEQ ID NO: 259 - DNA, 741 bp, synthetic construct
  misc_feature 1..741: note = source = /note="Description of Artificial Sequence: Synthetic polynucleotide"
  source 1..741: mol_type = other DNA
caagtccaactggtccagagcggtgcagaagtgaagaagcccggagcgagcgtgaaagtgtcctgcaaggcttccgggtacaccttctccaactacggcatcacttgggtgcgccaggccccgggacagggcctggaatggatggggtggatttccgcgtacaacggcaatacgaactacgctcagaagttccagggtagagtgaccatgactaggaacacctccatttccaccgcctacatggaactgtcctccctgcggagcgaggacaccgccgtgtactattgcgcccggggaccatactactactacatggatgtctgggggaaggggactatggtcaccgtgtcatccgcctcgggaggcggcggatcaggaggacgcgcctctggtggtggaggatcggagatcgtgatgacccagagccctctctccttgcccgtgactcctggggagcccgcatccatttcatgccggagctcccagtcacttctctactccaacggctataactacgtggattggtacctccaaaagccgggccagagcccgcagctgctgatctacctgggctcgaacagggccagcggagtgcctgaccggttctccgggtcgggaagcgggaccgacttcaagctgcaaatctcgagagtggaggccgaggacgtgggaatctactactgtatgcagggccgccagtttccgtactcgttcggacagggcaccaaagtggaaatcaag

SEQ ID NO: 260 - DNA, 714 bp, synthetic construct
  misc_feature 1..714: note = source = /note="Description of Artificial Sequence: Synthetic polynucleotide"
  source 1..714: mol_type = other DNA
gaagtgcaattgctcgaaactggaggaggtctggtgcaacctggaggatcacttcgcctgtcctgcgccgtgtcgggctttgccctgtccaaccatggaatgagctgggtccgccgcgcgccggggaagggcctcgaatgggtgtccggcatcgtctactccggctccacctactacgccgcgtccgtgaagggccggttcacgatttcacgggacaactcgcggaacaccctgtacctccaaatgaattcccttcggccggaggatactgccatctactactgctccgcccacggtggcgaatccgacgtctggggccagggaaccaccgtgaccgtgtccagcgcgtccgggggaggaggaagcgggggtagagcatcgggtggaggcggatcagagatcgtgctgacccagtcccccgccaccttgagcgtgtcaccaggagagtccgccaccctgtcatgccgcgccagccagtccgtgtcctccaacctggcttggtaccagcagaagccggggcaggcccctagactcctgatctatggggcgtcgacccgggcatctggaattcccgataggttcagcggatcgggctcgggcactgacttcactctgaccatctcctcgctgcaagccgaggacgtggctgtgtactactgtcagcagtacggaagctccctgactttcggtggcgggaccaaagtcgagattaag

SEQ ID NO: 261 - DNA, 717 bp, synthetic construct
  misc_feature 1..717: note = source = /note="Description of Artificial Sequence: Synthetic polynucleotide"
  source 1..717: mol_type = other DNA
gaagtgcaattggtggaaactggaggaggacttgtgcaacctggaggatcattgagactgagctgcgcagtgtcgggattcgccctgagcaaccatggaatgtcctgggtcagaagggcccctggaaaaggcctcgaatgggtgtcagggatcgtgtactccggttccacttactacgccgcctccgtgaaggggcgcttcactatctcacgggataactcccgcaataccctgtacctccaaatgaacagcctgcggccggaggataccgccatctactactgttccgcccacggtggagagtctgacgtctggggccagggaactaccgtgaccgtgtcctccgcgtccggcggtggagggagcggcggccgcgccagcggcggcggaggctccgagatcgtgatgacccagagccccgctactctgtcggtgtcgcccggagaaagggcgaccctgtcctgccgggcgtcgcagtccgtgagcagcaagctggcttggtaccagcagaagccgggccaggcaccacgcctgcttatgtacggtgcctccattcgggccaccggaatcccggaccggttctcggggtcggggtccggtaccgagttcacactgaccatttcctcgctcgagcccgaggactttgccgtctattactgccagcagtacggctcctcctcatggacgttcggccaggggaccaaggtcgaaatcaag

SEQ ID NO: 262 - DNA, 723 bp, synthetic construct
  misc_feature 1..723: note = source = /note="Description of Artificial Sequence: Synthetic polynucleotide"
  source 1..723: mol_type = other DNA
gaagtgcaattggtggagactggaggaggagtggtgcaacctggaggaagcctgagactgtcatgcgcggtgtcgggcttcgccctctccaaccacggaatgtcctgggtccgccgggcccctgggaaaggacttgaatgggtgtccggcatcgtgtactcgggttccacctactacgcggcctcagtgaagggccggtttactattagccgcgacaactccagaaacacactgtacctccaaatgaactcgctgcggccggaagataccgctatctactactgctccgcccatgggggagagtcggacgtctggggacagggcaccactgtcactgtgtccagcgcttccggcggtggtggaagcgggggacgggcctcaggaggcggtggcagcgagattgtgctgacccagtcccccgggaccctgagcctgtccccgggagaaagggccaccctctcctgtcgggcatcccagtccgtggggtctactaaccttgcatggtaccagcagaagcccggccaggcccctcgcctgctgatctacgacgcgtccaatagagccaccggcatcccggatcgcttcagcggaggcggatcgggcaccgacttcaccctcaccatttcaaggctggaaccggaggacttcgccgtgtactactgccagcagtatggttcgtccccaccctggacgttcggccaggggactaaggtcgagatcaag

SEQ ID NO: 263 - DNA, 717 bp, synthetic construct
  misc_feature 1..717: note = source = /note="Description of Artificial Sequence: Synthetic polynucleotide"
  source 1..717: mol_type = other DNA
caagtgcaactcgtggaatctggtggaggactcgtgaaacctggaggatcattgagactgtcatgcgcggcctcgggattcacgttctccgattactacatgagctggattcgccaggctccggggaagggactggaatgggtgtcctacatttcctcatccggctccaccatctactacgcggactccgtgaaggggagattcaccattagccgcgataacgccaagaacagcctgtaccttcagatgaactccctgcgggctgaagatactgccgtctactactgcgcaagggagagcggagatgggatggacgtctggggacagggtaccactgtgaccgtgtcgtcggcctccggcggagggggttcgggtggaagggccagcggcggcggaggcagcgacatccagatgacccagtccccctcatcgctgtccgcctccgtgggcgaccgcgtcaccatcacatgccgggcctcacagtcgatctcctcctacctcaattggtatcagcagaagcccggaaaggcccctaagcttctgatctacgcagcgtcctccctgcaatccggggtcccatctcggttctccggctcgggcagcggtaccgacttcactctgaccatctcgagcctgcagccggaggacttcgccacttactactgtcagcaaagctacaccctcgcgtttggccagggcaccaaagtggacatcaag

SEQ ID NO: 264 - DNA, 717 bp, synthetic construct
  misc_feature 1..717: note = source = /note="Description of Artificial Sequence: Synthetic polynucleotide"
  source 1..717: mol_type = other DNA
gaagtgcaattggtggaatcagggggaggacttgtgcagcctggaggatcgctgagactgtcatgtgccgtgtccggctttgccctgtccaaccacgggatgtcctgggtccgccgcgcgcctggaaagggcctcgaatgggtgtcgggtattgtgtacagcggtagcacctactatgccgcatccgtgaaggggagattcaccatcagccgggacaactccaggaacactctgtacctccaaatgaattcgctgaggccagaggacactgccatctactactgctccgcgcatggcggagagtccgacgtctggggacaggggaccaccgtgaccgtgtctagcgcgtccggcggaggcggcagcgggggtcgggcatcagggggcggcggatcggacatccagctcacccagtccccgagctcgctgtccgcctccgtgggagatcgggtcaccatcacgtgccgcgccagccagtcgatttcctcctacctgaactggtaccaacagaagcccggaaaagccccgaagcttctcatctacgccgcctcgagcctgcagtcaggagtgccctcacggttctccggctccggttccggtactgatttcaccctgaccatttcctccctgcaaccggaggacttcgctacttactactgccagcagtcgtactccaccccctacactttcggacaaggcaccaaggtcgaaatcaag

SEQ ID NO: 265 - DNA, 738 bp, synthetic construct
  misc_feature 1..738: note = source = /note="Description of Artificial Sequence: Synthetic polynucleotide"
  source 1..738: mol_type = other DNA
caagtgcaactggtgcaaagcggaggaggattggtcaaacccggaggaagcctgagactgtcatgcgcggcctctggattcaccttctccgattactacatgtcatggatcagacaggccccggggaagggcctcgaatgggtgtcctacatctcgtcctccgggaacaccatctactacgccgacagcgtgaagggccgctttaccatttcccgcgacaacgcaaagaactcgctgtaccttcagatgaattccctgcgggctgaagataccgcggtgtactattgcgcccggtccactatggtccgggaggactactggggacagggcacactcgtgaccgtgtccagcgcgagcgggggtggaggcagcggtggacgcgcctccggcggcggcggttcagacatcgtgctgactcagtcgcccctgtcgctgccggtcaccctgggccaaccggcctcaattagctgcaagtcctcggagagcctggtgcacaactcaggaaagacttacctgaactggttccatcagcggcctggacagtccccacggaggctcatctatgaagtgtccaacagggattcgggggtgcccgaccgcttcactggctccgggtccggcaccgacttcaccttgaaaatctccagagtggaagccgaggacgtgggcgtgtactactgtatgcagggtacccactggcctggaacctttggacaaggaactaagctcgagattaag

SEQ ID NO: 266 - DNA, 717 bp, synthetic construct
  misc_feature 1..717: note = source = /note="Description of Artificial Sequence: Synthetic polynucleotide"
  source 1..717: mol_type = other DNA
caagtgcaactcgtggaatctggtggaggactcgtgcaacccggtggaagccttaggctgtcgtgcgccgtcagcgggtttgctctgagcaaccatggaatgtcctgggtccgccgggcaccgggaaaagggctggaatgggtgtccggcatcgtgtacagcgggtcaacctattacgccgcgtccgtgaagggcagattcactatctcaagagacaacagccggaacaccctgtacttgcaaatgaattccctgcgccccgaggacaccgccatctactactgctccgcccacggaggagagtcggacgtgtggggccagggaacgactgtgactgtgtccagcgcatcaggagggggtggttcgggcggccgggcctcggggggaggaggttccgacattcggctgacccagtccccgtccccactgtcggcctccgtcggcgaccgcgtgaccatcacttgtcaggcgtccgaggacattaacaagttcctgaactggtaccaccagacccctggaaaggcccccaagctgctgatctacgatgcctcgacccttcaaactggagtgcctagccggttctccgggtccggctccggcactgatttcactctgaccatcaactcattgcagccggaagatatcgggacctactattgccagcagtacgaatccctcccgctcacattcggcgggggaaccaaggtcgagattaag

SEQ ID NO: 267 - DNA, 720 bp, synthetic construct
  misc_feature 1..720: note = source = /note="Description of Artificial Sequence: Synthetic polynucleotide"
  source 1..720: mol_type = other DNA
gaagtgcaattggtggaaactggaggaggacttgtgcaacctggaggatcattgcggctctcatgcgctgtctccggcttcgccctgtcaaatcacgggatgtcgtgggtcagacgggccccgggaaagggtctggaatgggtgtcggggattgtgtacagcggctccacctactacgccgcttcggtcaagggccgcttcactatttcacgggacaacagccgcaacaccctctatctgcaaatgaactctctccgcccggaggataccgccatctactactgctccgcacacggcggcgaatccgacgtgtggggacagggaaccactgtcaccgtgtcgtccgcatccggtggcggaggatcgggtggccgggcctccgggggcggcggcagcgagactaccctgacccagtcccctgccactctgtccgtgagcccgggagagagagccacccttagctgccgggccagccagagcgtgggctccaacctggcctggtaccagcagaagccaggacagggtcccaggctgctgatctacggagcctccactcgcgcgaccggcatccccgcgaggttctccgggtcgggttccgggaccgagttcaccctgaccatctcctccctccaaccggaggacttcgcggtgtactactgtcagcagtacaacgattggctgcccgtgacatttggacaggggacgaaggtggaaatcaaa

SEQ ID NO: 268 - DNA, 723 bp, synthetic construct
  misc_feature 1..723: note = source = /note="Description of Artificial Sequence: Synthetic polynucleotide"
  source 1..723: mol_type = other DNA
gaagtgcaattggtggaatctggtggaggacttgtgcaacctggaggatcactgagactgtcatgcgcggtgtccggttttgccctgagcaatcatgggatgtcgtgggtccggcgcgcccccggaaagggtctggaatgggtgtcgggtatcgtctactccgggagcacttactacgccgcgagcgtgaagggccgcttcaccatttcccgcgataactcccgcaacaccctgtacttgcaaatgaactcgctccggcctgaggacactgccatctactactgctccgcacacggaggagaatccgacgtgtggggccagggaactaccgtgaccgtcagcagcgcctccggcggcgggggctcaggcggacgggctagcggcggcggtggctccgagatcgtgctgacccagtcgcctggcactctctcgctgagccccggggaaagggcaaccctgtcctgtcgggccagccagtccattggatcatcctccctcgcctggtatcagcagaaaccgggacaggctccgcggctgcttatgtatggggccagctcaagagcctccggcattcccgaccggttctccgggtccggttccggcaccgatttcaccctgactatctcgaggctggagccagaggacttcgccgtgtactactgccagcagtacgcggggtccccgccgttcacgttcggacagggaaccaaggtcgagatcaag

SEQ ID NO: 269 - protein, 120 aa, synthetic construct
  REGION 1..120: note = source = /note="Description of Artificial Sequence: Synthetic polypeptide"
QVQLVESGGGLVQPGRSLRLSCAASGFTFSNYAMSWVRQAPGKGLGWVSGISRSGENTYYADSVKGRFTISRDNSKNTLYLQMNSLRDEDTAVYYCARSPAHYYGGMDVWGQGTTVTVSS

SEQ ID NO: 270 - protein, 115 aa, synthetic construct
  REGION 1..115: note = source = /note="Description of Artificial Sequence: Synthetic polypeptide"
QVQLVESGGGLVQPGRSLRLSCAASGFTFDDYAMHWVRQAPGKGLEWVSGISWNSGSIGYADSVKGRFTISRDNAKNSLYLQMNSLRAEDTALYYCSVHSFLAYWGQGTLVTVSS

SEQ ID NO: 271 - protein, 115 aa, synthetic construct
  REGION 1..115: note = source = /note="Description of Artificial Sequence: Synthetic polypeptide"
EVQLLESGGGLVQPGGSLRLSCAVSGFALSNHGMSWVRRAPGKGLEWVSGIVYSGSTYYAASVKGRFTISRDNSRNTLYLQMNSLRPEDTAIYYCSAHGGESDVWGQGTTVTVSS

SEQ ID NO: 272 - protein, 120 aa, synthetic construct
  REGION 1..120: note = source = /note="Description of Artificial Sequence: Synthetic polypeptide"
QVQLVQSGAEVRKTGASVKVSCKASGYIFDNFGINWVRQAPGQGLEWMGWINPKNNNTNYAQKFQGRVTITADESTNTAYMEVSSLRSEDTAVYYCARGPYYYQSYMDVWGQGTMVTVSS

SEQ ID NO: 273 - protein, 123 aa, synthetic construct
  REGION 1..123: note = source = /note="Description of Artificial Sequence: Synthetic polypeptide"
QVQLQESGGGLVQPGGSLRLSCAASGFTFSSDAMTWVRQAPGKGLEWVSVISGSGGTTYYADSVKGRFTISRDNSKNTLYLQMNSLRAEDTAVYYCAKLDSSGYYYARGPRYWGQGTLVTVSS

SEQ ID NO: 274 - protein, 118 aa, synthetic construct
  REGION 1..118: note = source = /note="Description of Artificial Sequence: Synthetic polypeptide"
QVQLVQSGAEVKKPGASVKVSCKASGYTFSNYGITWVRQAPGQGLEWMGWISAYNGNTNYAQKFQGRVTMTRNTSISTAYMELSSLRSEDTAVYYCARGPYYYYMDVWGKGTMVTVSS

SEQ ID NO: 275 - protein, 115 aa, synthetic construct
  REGION 1..115: note = source = /note="Description of Artificial Sequence: Synthetic polypeptide"
EVQLLETGGGLVQPGGSLRLSCAVSGFALSNHGMSWVRRAPGKGLEWVSGIVYSGSTYYAASVKGRFTISRDNSRNTLYLQMNSLRPEDTAIYYCSAHGGESDVWGQGTTVTVSS

SEQ ID NO: 276 - protein, 115 aa, synthetic construct
  REGION 1..115: note = source = /note="Description of Artificial Sequence: Synthetic polypeptide"
EVQLVETGGGLVQPGGSLRLSCAVSGFALSNHGMSWVRRAPGKGLEWVSGIVYSGSTYYAASVKGRFTISRDNSRNTLYLQMNSLRPEDTAIYYCSAHGGESDVWGQGTTVTVSS

SEQ ID NO: 277 - protein, 115 aa, synthetic construct
  REGION 1..115: note = source = /note="Description of Artificial Sequence: Synthetic polypeptide"
EVQLVETGGGVVQPGGSLRLSCAVSGFALSNHGMSWVRRAPGKGLEWVSGIVYSGSTYYAASVKGRFTISRDNSRNTLYLQMNSLRPEDTAIYYCSAHGGESDVWGQGTTVTVSS

SEQ ID NO: 278 - protein, 117 aa, synthetic construct
  REGION 1..117: note = source = /note="Description of Artificial Sequence: Synthetic polypeptide"
QVQLVESGGGLVKPGGSLRLSCAASGFTFSDYYMSWIRQAPGKGLEWVSYISSSGSTIYYADSVKGRFTISRDNAKNSLYLQMNSLRAEDTAVYYCARESGDGMDVWGQGTTVTVSS

SEQ ID NO: 279 - protein, 115 aa, synthetic construct
  REGION 1..115: note = source = /note="Description of Artificial Sequence: Synthetic polypeptide"
EVQLVESGGGLVQPGGSLRLSCAVSGFALSNHGMSWVRRAPGKGLEWVSGIVYSGSTYYAASVKGRFTISRDNSRNTLYLQMNSLRPEDTAIYYCSAHGGESDVWGQGTTVTVSS

SEQ ID NO: 280 - protein, 117 aa, synthetic construct
  REGION 1..117: note = source = /note="Description of Artificial Sequence: Synthetic polypeptide"
QVQLVQSGGGLVKPGGSLRLSCAASGFTFSDYYMSWIRQAPGKGLEWVSYISSSGNTIYYADSVKGRFTISRDNAKNSLYLQMNSLRAEDTAVYYCARSTMVREDYWGQGTLVTVSS

SEQ ID NO: 281 - protein, 115 aa, synthetic construct
  REGION 1..115: note = source = /note="Description of Artificial Sequence: Synthetic polypeptide"
QVQLVESGGGLVQPGGSLRLSCAVSGFALSNHGMSWVRRAPGKGLEWVSGIVYSGSTYYAASVKGRFTISRDNSRNTLYLQMNSLRPEDTAIYYCSAHGGESDVWGQGTTVTVSS

SEQ ID NO: 282 - protein, 115 aa, synthetic construct; identical to SEQ ID NO: 276
  REGION 1..115: note = source = /note="Description of Artificial Sequence: Synthetic polypeptide"

SEQ ID NO: 283 - protein, 115 aa, synthetic construct; identical to SEQ ID NO: 279
  REGION 1..115: note = source = /note="Description of Artificial Sequence: Synthetic polypeptide"

SEQ ID NO: 284 - protein, 109 aa, synthetic construct
  REGION 1..109: note = source = /note="Description of Artificial Sequence: Synthetic polypeptide"
DIVLTQSPGTLSLSPGERATLSCRASQSISSSFLAWYQQKPGQAPRLLIYGASRRATGIPDRFSGSGSGTDFTLTISRLEPEDSAVYYCQQYHSSPSWTFGQGTKLEIK

SEQ ID NO: 285 - protein, 112 aa, synthetic construct
  REGION 1..112: note = source = /note="Description of Artificial Sequence: Synthetic polypeptide"
DIVMTQTPLSLPVTPGEPASISCRSSQSLLHSNGYNYLDWYLQKPGQSPQLLIYLGSNRASGVPDRFSGSGSGTDFTLKISRVEAEDVGVYYCMQALQTPYTFGQGTKVEIK

SEQ ID NO: 286 - protein, 111 aa, synthetic construct
  REGION 1..111: note = source = /note="Description of Artificial Sequence: Synthetic polypeptide"
DIVMTQTPLSLSVTPGQPASISCKSSQSLLRNDGKTPLYWYLQKAGQPPQLLIYEVSNRFSGVPDRFSGSGSGTDFTLKISRVEAEDVGAYYCMQNIQFPSFGGGTKLEIK

SEQ ID NO: 287 - protein, 112 aa, synthetic construct
  REGION 1..112: note = source = /note="Description of Artificial Sequence: Synthetic polypeptide"
DIVMTQTPLSLPVTPGEPASISCRSSQSLLHSNGYNYLNWYLQKPGQSPQLLIYLGSKRASGVPDRFSGSGSGTDFTLHITRVGAEDVGVYYCMQALQTPYTFGQGTKLEIK

SEQ ID NO: 288 - protein, 106 aa, synthetic construct
  REGION 1..106: note = source = /note="Description of Artificial Sequence: Synthetic polypeptide"
DIQLTQSPSSLSASVGDRVTITCRASQSISSYLNWYQQKPGKAPKLLIYGASTLASGVPARFSGSGSGTHFTLTINSLQSEDSATYYCQQSYKRASFGQGTKVEIK

SEQ ID NO: 289 - protein, 112 aa, synthetic construct
  REGION 1..112: note = source = /note="Description of Artificial Sequence: Synthetic polypeptide"
EIVMTQSPLSLPVTPGEPASISCRSSQSLLYSNGYNYVDWYLQKPGQSPQLLIYLGSNRASGVPDRFSGSGSGTDFKLQISRVEAEDVGIYYCMQGRQFPYSFGQGTKVEIK

SEQ ID NO: 290 - protein, 106 aa, synthetic construct
  REGION 1..106: note = source = /note="Description of Artificial Sequence: Synthetic polypeptide"
EIVLTQSPATLSVSPGESATLSCRASQSVSSNLAWYQQKPGQAPRLLIYGASTRASGIPDRFSGSGSGTDFTLTISSLQAEDVAVYYCQQYGSSLTFGGGTKVEIK

SEQ ID NO: 291 - protein, 107 aa, synthetic construct
  REGION 1..107: note = source = /note="Description of Artificial Sequence: Synthetic polypeptide"
EIVMTQSPATLSVSPGERATLSCRASQSVSSKLAWYQQKPGQAPRLLMYGASIRATGIPDRFSGSGSGTEFTLTISSLEPEDFAVYYCQQYGSSSWTFGQGTKVEIK

SEQ ID NO: 292 - protein, 109 aa, synthetic construct
  REGION 1..109: note = source = /note="Description of Artificial Sequence: Synthetic polypeptide"
EIVLTQSPGTLSLSPGERATLSCRASQSVGSTNLAWYQQKPGQAPRLLIYDASNRATGIPDRFSGGGSGTDFTLTISRLEPEDFAVYYCQQYGSSPPWTFGQGTKVEIK

SEQ ID NO: 293 - protein, 105 aa, synthetic construct
  REGION 1..105: note = source = /note="Description of Artificial Sequence: Synthetic polypeptide"
DIQMTQSPSSLSASVGDRVTITCRASQSISSYLNWYQQKPGKAPKLLIYAASSLQSGVPSRFSGSGSGTDFTLTISSLQPEDFATYYCQQSYTLAFGQGTKVDIK

SEQ ID NO: 294 - protein, 107 aa, synthetic construct
  REGION 1..107: note = source = /note="Description of Artificial Sequence: Synthetic polypeptide"
DIQLTQSPSSLSASVGDRVTITCRASQSISSYLNWYQQKPGKAPKLLIYAASSLQSGVPSRFSGSGSGTDFTLTISSLQPEDFATYYCQQSYSTPYTFGQGTKVEIK

SEQ ID NO: 295 - protein, 112 aa, synthetic construct
  REGION 1..112: note = source = /note="Description of Artificial Sequence: Synthetic polypeptide"
DIVLTQSPLSLPVTLGQPASISCKSSESLVHNSGKTYLNWFHQRPGQSPRRLIYEVSNRDSGVPDRFTGSGSGTDFTLKISRVEAEDVGVYYCMQGTHWPGTFGQGTKLEIK

SEQ ID NO: 296 - protein, 107 aa, synthetic construct
  REGION 1..107: note = source = /note="Description of Artificial Sequence: Synthetic polypeptide"
DIRLTQSPSPLSASVGDRVTITCQASEDINKFLNWYHQTPGKAPKLLIYDASTLQTGVPSRFSGSGSGTDFTLTINSLQPEDIGTYYCQQYESLPLTFGGGTKVEIK

SEQ ID NO: 297 - protein, 108 aa, synthetic construct
  REGION 1..108: note = source = /note="Description of Artificial Sequence: Synthetic polypeptide"
ETTLTQSPATLSVSPGERATLSCRASQSVGSNLAWYQQKPGQGPRLLIYGASTRATGIPARFSGSGSGTEFTLTISSLQPEDFAVYYCQQYNDWLPVTFGQGTKVEIK

SEQ ID NO: 298 - protein, 109 aa, synthetic construct
  REGION 1..109: note = source = /note="Description of Artificial Sequence: Synthetic polypeptide"
EIVLTQSPGTLSLSPGERATLSCRASQSIGSSSLAWYQQKPGQAPRLLMYGASSRASGIPDRFSGSGSGTDFTLTISRLEPEDFAVYYCQQYAGSPPFTFGQGTKVEIK

SEQ ID NO: 299-328 - skipped (30 entries)

SEQ ID NO: 329 - protein, 243 aa, synthetic construct
  REGION 1..243: note = source = /note="Description of Artificial Sequence: Synthetic polypeptide"
QVQLQESGPGLVKPSETLSLTCTVSGGSISSSYYYWGWIRQPPGKGLEWIGSIYYSGSAYYNPSLKSRVTISVDTSKNQFSLRLSSVTAADTAVYYCARHWQEWPDAFDIWGQGTMVTVSSGGGGSGGGGSGGGGSETTLTQSPAFMSATPGDKVIISCKASQDIDDAMNWYQQKPGEAPLFIIQSATSPVPGIPPRFSGSGFGTDFSLTINNIESEDAAYYFCLQHDNFPLTFGQGTKLEIK

SEQ ID NO: 330 - protein, 245 aa, synthetic construct
  REGION 1..245: note = source = /note="Description of Artificial Sequence: Synthetic polypeptide"
QVNLRESGPALVKPTQTLTLTCTFSGFSLRTSGMCVSWIRQPPGKALEWLARIDWDEDKFYSTSLKTRLTISKDTSDNQVVLRMTNMDPADTATYYCARSGAGGTSATAFDIWGPGTMVTVSSGGGGSGGGGSGGGGSDIQMTQSPSSLSASVGDRVTITCRASQDIYNNLAWFQLKPGSAPRSLMYAANKSQSGVPSRFSGSASGTDFTLTISSLQPEDFATYYCQHYYRFPYSFGQGTKLEIK

SEQ ID NO: 331 - protein, 246 aa, synthetic construct
  REGION 1..246: note = source = /note="Description of Artificial Sequence: Synthetic polypeptide"
EVQLVESGGGLVKPGGSLRLSCAASGFTFSSYSMNWVRQAPGKGLEWVSSISSSSSYIYYADSVKGRFTISRDNAKNSLYLQMNSLRAEDTAVYYCAKTIAAVYAFDIWGQGTTVTVSSGGGGSGGGGSGGGGSEIVLTQSPLSLPVTPEEPASISCRSSQSLLHSNGYNYLDWYLQKPGQSPQLLIYLGSNRASGVPDRFSGSGSGTDFTLKISRVEAEDVGVYYCMQALQTPYTFGQGTKLEIK

SEQ ID NO: 332 - protein, 240 aa, synthetic construct
  REGION 1..240: note = source = /note="Description of Artificial Sequence: Synthetic polypeptide"
EVQLVESGGGLVKPGGSLRLSCAASGFTFSDYYMSWIRQAPGKGLEWVSYISSSGSTIYYADSVKGRFTISRDNAKNSLYLQMNSLRAEDTAVYYCARDLRGAFDIWGQGTMVTVSSGGGGSGGGGSGGGGSSYVLTQSPSVSAAPGYTATISCGGNNIGTKSVHWYQQKPGQAPLLVIRDDSVRPSKIPGRFSGSNSGNMATLTISGVQAGDEADFYCQVWDSDSEHVVFGGGTKLTVL

SEQ ID NO: 333 - protein, 241 aa, synthetic construct
  REGION 1..241: note = source = /note="Description of Artificial Sequence: Synthetic polypeptide"
QVQLVQSGAEVKKPGASVKVSCKPSGYTVTSHYIHWVRRAPGQGLEWMGMINPSGGVTAYSQTLQGRVTMTSDTSSSTVYMELSSLRSEDTAMYYCAREGSGSGWYFDFWGRGTLVTVSSGGGGSGGGGSGGGGSSYVLTQPPSVSVSPGQTASITCSGDGLSKKYVSWYQQKAGQSPVVLISRDKERPSGIPDRFSGSNSADTATLTISGTQAMDEADYYCQAWDDTTVVFGGGTKLTVL

SEQ ID NO: 334 - protein, 245 aa, synthetic construct
  REGION 1..245: note = source = /note="Description of Artificial Sequence: Synthetic polypeptide"
QVQLQESGPGLVKPSQTLSLTCTVSGGSISSGGYYWSWIRQHPGKGLEWIGYIYYSGSTYYNPSLKSRVTISVDTSKNQFSLKLSSVTAADTAVYYCARAGIAARLRGAFDIWGQGTMVTVSSGGGGSGGGGSGGGGSDIVMTQSPSSVSASVGDRVIITCRASQGIRNWLAWYQQKPGKAPNLLIYAASNLQSGVPSRFSGSGSGADFTLTISSLQPEDVATYYCQKYNSAPFTFGPGTKVDIK

SEQ ID NO: 335 - protein, 253 aa, synthetic construct
  REGION 1..253: note = source = /note="Description of Artificial Sequence: Synthetic polypeptide"
QVQLVQSGAEVKKPGSSVKVSCKASGGTFSSYAISWVRQAPGQGLEWMGGIIPIFGTANYAQKFQGRVTITADESTSTAYMELSSLRSEDTAVYYCARRGGYQLLRWDVGLLRSAFDIWGQGTMVTVSSGGGGSGGGGSGGGGSSYVLTQPPSVSVAPGQTARITCGGNNIGSKSVHWYQQKPGQAPVLVLYGKNNRPSGVPDRFSGSRSGTTASLTITGAQAEDEADYYCSSRDSSGDHLRVFGTGTKVTVL

SEQ ID NO: 336 - protein, 248 aa, synthetic construct
  REGION 1..248: note = source = /note="Description of Artificial Sequence: Synthetic polypeptide"
EVQLQQSGPGLVKPSQTLSLTCAISGDSVSSNSAAWNWIRQSPSRGLEWLGRTYYRSKWYSFYAISLKSRIIINPDTSKNQFSLQLKSVTPEDTAVYYCARSSPEGLFLYWFDPWGQGTLVTVSSGGDGSGGGGSGGGGSSSELTQDPAVSVALGQTIRITCQGDSLGNYYATWYQQKPGQAPVLVIYGTNNRPSGIPDRFSASSSGNTASLTITGAQAEDEADYYCNSRDSSGHHLLFGTGTKVTVL

SEQ ID NO: 337 - protein, 246 aa, synthetic construct
  REGION 1..246: note = source = /note="Description of Artificial Sequence: Synthetic polypeptide"
EVQLVESGGGLVQPGGSLRLSCAASGFTFSSYAMSWVRQAPGKGLEWVSAISGSGGSTYYADSVKGRFTISRDNSKNTLYLQMNSLRAEDTAVYYCAKVEGSGSLDYWGQGTLVTVSSGGGGSGGGGSGGGGSEIVMTQSPGTLSLSPGERATLSCRASQSVSSAYLAWYQQKPGQPPRLLISGASTRATGIPDRFGGSGSGTDFTLTISRLEPEDFAVYYCQHYGSSFNGSSLFTFGQGTRLEIK

SEQ ID NO: 338 - protein, 241 aa, synthetic construct
  REGION 1..241: note = source = /note="Description of Artificial Sequence: Synthetic polypeptide"
EVQLVETGGGLVQPGGSLRLSCAASGITFSRYPMSWVRQAPGKGLEWVSGISDSGVSTYYADSAKGRFTISRDNSKNTLFLQMSSLRDEDTAVYYCVTRAGSEASDIWGQGTMVTVSSGGGGSGGGGSGGGGSEIVLTQSPATLSLSPGERATLSCRASQSVSNSLAWYQQKPGQAPRLLIYDASSRATGIPDRFSGSGSGTDFTLTISRLEPEDFAIYYCQQFGTSSGLTFGGGTKLEIK

SEQ ID NO: 339 - protein, 248 aa, synthetic construct
  REGION 1..248: note = source = /note="Description of Artificial Sequence: Synthetic polypeptide"
QVQLVESGGGLVQPGGSLRLSCAASGFTFSSYAMSWVRQAPGKGLEWVSAISGSGGSTYYADSVKGRFTISRDNAKNSLYLQMNSLRAEDTAIYYCARATYKRELRYYYGMDVWGQGTMVTVSSGGGGSGGGGSGGGGSEIVMTQSPGTVSLSPGERATLSCRASQSVSSSFLAWYQQKPGQAPRLLIYGASSRATGIPDRFSGSGSGTDFTLTISRLEPEDSAVYYCQQYHSSPSWTFGQGTRLEIK

SEQ ID NO: 340 - protein, 248 aa, synthetic construct
  REGION 1..248: note = source = /note="Description of Artificial Sequence: Synthetic polypeptide"
EVQLVETGGGLVQPGGSLRLSCAASGFTFSSYAMSWVRQAPGKGLEWVSAISGSGGSTYYADSVKGRFTISRDNSKNTLYLQMNTLKAEDTAVYYCARATYKRELRYYYGMDVWGQGTTVTVSSGGGGSGGGGSGGGGSEIVLTQSPSTLSLSPGESATLSCRASQSVSTTFLAWYQQKPGQAPRLLIYGSSNRATGIPDRFSGSGSGTDFTLTIRRLEPEDFAVYYCQQYHSSPSWTFGQGTKVEIK

SEQ ID NO: 341 - protein, 239 aa, synthetic construct
  REGION 1..239: note = source = /note="Description of Artificial Sequence: Synthetic polypeptide"
EVQLVETGGGLVQPGRSLRLSCAASGFTFDDYAMHWVRQAPGKGLEWVSGISWNSGSIGYADSVKGRFTISRDNAKNSLYLQMNSLRDEDTAVYYCARVGKAVPDVWGQGTTVTVSSGGGGSGGGGSGGGGSDIVMTQTPSSLSASVGDRVTITCRASQSISSYLNWYQQKPGKAPKLLIYAASSLQSGVPSRFSGSGSGTDFTLTISSLQPEDFATYYCQQSYSTPYSFGQGTRLEIK

SEQ ID NO: 342 - protein, 246 aa, synthetic construct
  REGION 1..246: note = source = /note="Description of Artificial Sequence: Synthetic polypeptide"
EVQLVESGGGLVQPGRSLRLSCTASGFTFDDYAMHWVRQRPGKGLEWVASINWKGNSLAYGDSVKGRFAISRDNAKNTVFLQMNSLRTEDTAVYYCASHQGVAYYNYAMDVWGRGTLVTVSSGGGGSGGGGSGGGGSEIVLTQSPGTLSLSPGERATLSCRATQSIGSSFLAWYQQRPGQAPRLLIYGASQRATGIPDRFSGRGSGTDFTLTISRVEPEDSAVYYCQHYESSPSWTFGQGTKVEIK

SEQ ID NO: 343 - protein, 241 aa, synthetic construct
  REGION 1..241: note = source = /note="Description of Artificial Sequence: Synthetic polypeptide"
EVQLVESGGGLVQPGGSLRLSCAASGFTFSSYAMSWVRQAPGKGLEWVSAISGSGGSTYYADSVKGRFTISRDNSKNTLYLQMNSLRAEDTAVYYCAKVVRDGMDVWGQGTTVTVSSGGGGSGGGGSGGGGSEIVLTQSPATLSLSPGERATLSCRASQSVSSSYLAWYQQKPGQAPRLLIYGASSRATGIPDRFSGNGSGTDFTLTISRLEPEDFAVYYCQQYGSPPRFTFGPGTKVDIK

SEQ ID NO: 344 - protein, 242 aa, synthetic construct
  REGION 1..242: note = source = /note="Description of Artificial Sequence: Synthetic polypeptide"
EVQLLESGGGLVQPGGSLRLSCAASGFTFSSYAMSWVRQAPGKGLEWVSAISGSGGSTYYADSVKGRFTISRDNSKNTLYLQMNSLRAEDTAVYYCAKIPQTGTFDYWGQGTLVTVSSGGGGSGGGGSGGGGSEIVLTQSPGTLSLSPGERATLSCRASQSVSSSYLAWYQQRPGQAPRLLIYGASSRATGIPDRFSGSGSGTDFTLTISRLEPEDFAVYYCQHYGSSPSWTFGQGTRLEIK

SEQ ID NO: 345 - protein, 248 aa, synthetic construct
  REGION 1..248: note = source = /note="Description of Artificial Sequence: Synthetic polypeptide"
EVQLVETGGGLVQPGGSLRLSCAASGFTFSSYAMSWVRQAPGKGLEWVSAISGSGGSTYYADSVKGRFTMSRENDKNSVFLQMNSLRVEDTGVYYCARANYKRELRYYYGMDVWGQGTMVTVSSGGGGSGGGGSGGGGSEIVMTQSPGTLSLSPGESATLSCRASQRVASNYLAWYQHKPGQAPSLLISGASSRATGVPDRFSGSGSGTDFTLAISRLEPEDSAVYYCQHYDSSPSWTFGQGTKVEIK

SEQ ID NO: 346 - protein, 244 aa, synthetic construct
  REGION 1..244: note = source = /note="Description of Artificial Sequence: Synthetic polypeptide"
EVQLLETGGGLVQPGGSLRLSCAASGFSFSSYAMSWVRQAPGKGLEWVSAISGSGGSTYYADSVKGRFTISRDNSKNTLYLQMNSLRAEDTAVYYCAKALVGATGAFDIWGQGTLVTVSSGGGGSGGGGSGGGGSEIVLTQSPGTLSLSPGERATLSCRASQSLSSNFLAWYQQKPGQAPGLLIYGASNWATGTPDRFSGSGSGTDFTLTITRLEPEDFAVYYCQYYGTSPMYTFGQGTKVEIK

SEQ ID NO: 347 - protein, 244 aa, synthetic construct
  REGION 1..244: note = source = /note="Description of Artificial Sequence: Synthetic polypeptide"
EVQLLESGGGLVQPGGSLRLSCAASGFTFSSYAMSWVRQAPGKGLEWVSAISGSGGSTYYADSVKGRFTISRDNSKNTLYLQMNSLRAEDTAVYYCVLWFGEGFDPWGQGTLVTVSSGGGGSGGGGSGGGGSDIVLTQSPLSLPVTPGEPASISCRSSQSLLHSNGYNYLDWYLQKPGQSPQLLIYLGSNRASGVPDRFSGSGSGTDFTLKISRVEAEDVGVYYCMQALQTPLTFGGGTKVDIK

SEQ ID NO: 348 - protein, 251 aa, synthetic construct
  REGION 1..251: note = source = /note="Description of Artificial Sequence: Synthetic polypeptide"
QVQLVESGGGLVQPGGSLRLSCAASGFTFSSYAMSWVRQAPGKGLEWVSAISGSGGSTYYADSVKGRFTISRDNSKNTLYLQMNSLRAEDTAVYYCAKVGYDSSGYYRDYYGMDVWGQGTTVTVSSGGGGSGGGGSGGGGSEIVLTQSPGTLSLSPGERATLSCRASQSVSSSYLAWYQQKPGQAPRLLIYGTSSRATGISDRFSGSGSGTDFTLTISRLEPEDFAVYYCQHYGNSPPKFTFGPGTKLEIK

SEQ ID NO: 349 - protein, 246 aa, synthetic construct
  REGION 1..246: note = source = /note="Description of Artificial Sequence: Synthetic polypeptide"
EVQLVESGGGLVQPGGSLRLSCAASGFTFSSYAMSWVRQAPGKGLEWVSAISGSGGSTYYADSVKGRFTISRDNSKNTLYLQMNSLRAEDTAVYYCAKMGWSSGYLGAFDIWGQGTTVTVSSGGGGSGGGGSGGGGSEIVLTQSPGTLSLSPGERATLSCRASQSVASSFLAWYQQKPGQAPRLLIYGASGRATGIPDRFSGSGSGTDFTLTISRLEPEDFAVYYCQHYGGSPRLTFGGGTKVDIK

SEQ ID NO: 350 - DNA, 729 bp, synthetic construct
  misc_feature 1..729: note = source = /note="Description of Artificial Sequence: Synthetic polynucleotide"
  source 1..729: mol_type = other DNA
caagtgcagcttcaggaaagcggaccgggcctggtcaagccatccgaaactctctccctgacttgcactgtgtctggcggttccatctcatcgtcgtactactactggggctggattaggcagccgcccggaaagggactggagtggatcggaagcatctactattccggctcggcgtactacaaccctagcctcaagtcgagagtgaccatctccgtggatacctccaagaaccagttttccctgcgcctgagctccgtgaccgccgctgacaccgccgtgtactactgtgctcggcattggcaggaatggcccgatgccttcgacatttggggccagggcactatggtcactgtgtcatccgggggtggaggcagcgggggaggagggtccggggggggaggttcagagacaaccttgacccagtcacccgcattcatgtccgccactccgggagacaaggtcatcatctcgtgcaaagcgtcccaggatatcgacgatgccatgaattggtaccagcagaagcctggcgaagcgccgctgttcattatccaatccgcaacctcgcccgtgcctggaatcccaccgcggttcagcggcagcggtttcggaaccgacttttccctgaccattaacaacattgagtccgaggacgccgcctactacttctgcctgcaacacgacaacttccctctcacgttcggccagggaaccaagctggaaatcaag

SEQ ID NO: 351 - DNA, 735 bp, synthetic construct
  misc_feature 1..735: note = source = /note="Description of Artificial Sequence: Synthetic polynucleotide"
  source 1..735: mol_type = other DNA
caagtcaatctgcgcgaatccggccccgccttggtcaagcctacccagaccctcactctgacctgtactttctccggcttctccctgcggacttccgggatgtgcgtgtcctggatcagacagcctccgggaaaggccctggagtggctcgctcgcattgactgggatgaggacaagttctactccacctcactcaagaccaggctgaccatcagcaaagatacctctgacaaccaagtggtgctccgcatgaccaacatggacccagccgacactgccacttactactgcgcgaggagcggagcgggcggaacctccgccaccgccttcgatatttggggcccgggtaccatggtcaccgtgtcaagcggaggaggggggtccgggggcggcggttccgggggaggcggatcggacattcagatgactcagtcaccatcgtccctgagcgctagcgtgggcgacagagtgacaatcacttgccgggcatcccaggacatctataacaaccttgcgtggttccagctgaagcctggttccgcaccgcggtcacttatgtacgccgccaacaagagccagtcgggagtgccgtcccggttttccggttcggcctcgggaactgacttcaccctgacgatctccagcctgcaacccgaggatttcgccacctactactgccagcactactaccgctttccctactcgttcggacagggaaccaagctggaaatcaag

SEQ ID NO: 352 - DNA, 738 bp, synthetic construct
  misc_feature 1..738: note = source = /note="Description of Artificial Sequence: Synthetic polynucleotide"
  source 1..738: mol_type = other DNA
gaagtgcagcttgtcgaatccggggggggactggtcaagccgggcggatcactgagactgtcctgcgccgcgagcggcttcacgttctcctcctactccatgaactgggtccgccaagcccccgggaagggactggaatgggtgtcctctatctcctcgtcgtcgtcctacatctactacgccgactccgtgaagggaagattcaccatttcccgcgacaacgcaaagaactcactgtacttgcaaatgaactcactccgggccgaagatactgctgtgtactattgcgccaagactattgccgccgtctacgctttcgacatctggggccagggaaccaccgtgactgtgtcgtccggtggtggtggctcgggcggaggaggaagcggcggcggggggtccgagattgtgctgacccagtcgccactgagcctccctgtgacccccgaggaacccgccagcatcagctgccggtccagccagtccctgctccactccaacggatacaattacctcgattggtaccttcagaagcctggacaaagcccgcagctgctcatctacttgggatcaaaccgcgcgtcaggagtgcctgaccggttctccggctcgggcagcggtaccgatttcaccctgaaaatctccagggtggaggcagaggacgtgggagtgtattactgtatgcaggcgctgcagactccgtacacatttgggcagggcaccaagctggagatcaag

SEQ ID NO: 353 - DNA, 720 bp, synthetic construct
  misc_feature 1..720: note = source = /note="Description of Artificial Sequence: Synthetic polynucleotide"
  source 1..720: mol_type = other DNA
gaagtccagctcgtggagtccggcggaggccttgtgaagcctggaggttcgctgagactgtcctgcgccgcctccggcttcaccttctccgactactacatgtcctggatcagacaggccccgggaaagggcctggaatgggtgtcctacatctcgtcatcgggcagcactatctactacgcggactcagtgaaggggcggttcaccatttcccgggataacgcgaagaactcgctgtatctgcaaatgaactcactgagggccgaggacaccgccgtgtactactgcgcccgcgatctccgcggggcatttgacatctggggacagggaaccatggtcacagtgtccagcggagggggaggatcgggtggcggaggttccgggggtggaggctcctcctacgtgctgactcagagcccaagcgtcagcgctgcgcccggttacacggcaaccatctcctgtggcggaaacaacattgggaccaagtctgtgcactggtatcagcagaagccgggccaagctcccctgttggtgatccgcgatgactccgtgcggcctagcaaaattccgggacggttctccggctccaacagcggcaatatggccactctcaccatctcgggagtgcaggccggagatgaagccgacttctactgccaagtctgggactcagactccgagcatgtggtgttcgggggcggaaccaagctgactgtgctc

SEQ ID NO: 354 - DNA, 723 bp, synthetic construct
  misc_feature 1..723: note = source = /note="Description of Artificial Sequence: Synthetic polynucleotide"
  source 1..723: mol_type = other DNA
caagtgcagctggtgcagagcggggccgaagtcaagaagccgggagcctccgtgaaagtgtcctgcaagccttcgggatacaccgtgacctcccactacattcattgggtccgccgcgcccccggccaaggactcgagtggatgggcatgatcaaccctagcggcggagtgaccgcgtacagccagacgctgcagggacgcgtgactatgacctcggatacctcctcctccaccgtctatatggaactgtccagcctgcggtccgaggataccgccatgtactactgcgcccgggaaggatcaggctccgggtggtatttcgacttctggggaagaggcaccctcgtgactgtgtcatctgggggagggggttccggtggtggcggatcgggaggaggcggttcatcctacgtgctgacccagccaccctccgtgtccgtgagccccggccagactgcatcgattacatgtagcggcgacggcctctccaagaaatacgtgtcgtggtaccagcagaaggccggacagagcccggtggtgctgatctcaagagataaggagcggcctagcggaatcccggacaggttctcgggttccaactccgcggacactgctactctgaccatctcggggacccaggctatggacgaagccgattactactgccaagcctgggacgacactactgtcgtgtttggagggggcaccaagttgaccgtcctt

SEQ ID NO: 355 - DNA, 735 bp, synthetic construct
  misc_feature 1..735: note = source = /note="Description of Artificial Sequence: Synthetic polynucleotide"
  source 1..735: mol_type = other DNA
caagtgcagcttcaggagagcggcccgggactcgtgaagccgtcccagaccctgtccctgacttgcaccgtgtcgggaggaagcatctcgagcggaggctactattggtcgtggattcggcagcaccctggaaagggcctggaatggatcggctacatctactactccggctcgacctactacaacccatcgctgaagtccagagtgacaatctcagtggacacgtccaagaatcagttcagcctgaagctctcttccgtgactgcggccgacaccgccgtgtactactgcgcacgcgctggaattgccgcccggctgaggggtgccttcgacatttggggacagggcaccatggtcaccgtgtcctccggcggcggaggttccgggggtggaggctcaggaggaggggggtccgacatcgtcatgactcagtcgccctcaagcgtcagcgcgtccgtcggggacagagtgatcatcacctgtcgggcgtcccagggaattcgcaactggctggcctggtatcagcagaagcccggaaaggcccccaacctgttgatctacgccgcctcaaacctccaatccggggtgccgagccgcttcagcggctccggttcgggtgccgatttcactctgaccatctcctccctgcaacctgaagatgtggctacctactactgccaaaagtacaactccgcaccttttactttcggaccggggaccaaagtggacattaag

SEQ ID NO: 356 - DNA, 759 bp, synthetic construct
  misc_feature 1..759: note = source = /note="Description of Artificial Sequence: Synthetic polynucleotide"
  source 1..759: mol_type = other DNA
caagtgcagctggtccagtcgggcgccgaggtcaagaagcccgggagctctgtgaaagtgtcctgcaaggcctccgggggcacctttagctcctacgccatctcctgggtccgccaagcaccgggtcaaggcctggagtggatggggggaattatccctatcttcggcactgccaactacgcccagaagttccagggacgcgtgaccattaccgcggacgaatccacctccaccgcttatatggagctgtccagcttgcgctcggaagataccgccgtgtactactgcgcccggaggggtggataccagctgctgagatgggacgtgggcctcctgcggtcggcgttcgacatctggggccagggcactatggtcactgtgtccagcggaggaggcggatcgggaggcggcggatcagggggaggcggttccagctacgtgcttactcaacccccttcggtgtccgtggccccgggacagaccgccagaatcacttgcggaggaaacaacattgggtccaagagcgtgcattggtaccagcagaagccaggacaggcccctgtgctggtgctctacgggaagaacaatcggcccagcggagtgccggacaggttctcgggttcacgctccggtacaaccgcttcactgactatcaccggggcccaggcagaggatgaagcggactactactgttcctcccgggattcatccggcgaccacctccgggtgttcggaaccggaacgaaggtcaccgtgctg

SEQ ID NO: 357 - DNA, 744 bp, synthetic construct
  misc_feature 1..744: note = source = /note="Description of Artificial Sequence: Synthetic polynucleotide"
  source 1..744: mol_type = other DNA
gaagtgcagctccaacagtcaggaccggggctcgtgaagccatcccagaccctgtccctgacttgtgccatctcgggagatagcgtgtcatcgaactccgccgcctggaactggattcggcagagcccgtcccgcggactggagtggcttggaaggacctactaccggtccaagtggtactctttctacgcgatctcgctgaagtcccgcattatcattaaccctgatacctccaagaatcagttctccctccaactgaaatccgtcacccccgaggacacagcagtgtattactgcgcacggagcagccccgaaggactgttcctgtattggtttgacccctggggccaggggactcttgtgaccgtgtcgagcggcggagatgggtccggtggcggtggttcggggggcggcggatcatcatccgaactgacccaggacccggctgtgtccgtggcgctgggacaaaccatccgcattacgtgccagggagactccctgggcaactactacgccacttggtaccagcagaagccgggccaagcccctgtgttggtcatctacgggaccaacaacagaccttccggcatccccgaccggttcagcgcttcgtcctccggcaacactgccagcctgaccatcactggagcgcaggccgaagatgaggccgactactactgcaacagcagagactcctcgggtcatcacctcttgttcggaactggaaccaaggtcaccgtgctg

SEQ ID NO: 358 - DNA, 738 bp, synthetic construct
  misc_feature 1..738: note = source = /note="Description of Artificial Sequence: Synthetic polynucleotide"
  source 1..738: mol_type = other DNA
gaagtgcagctcgtggagtcaggaggcggcctggtccagccgggagggtcccttagactgtcatgcgccgcaagcggattcactttctcctcctatgccatgagctgggtccgccaagcccccggaaagggactggaatgggtgtccgccatctcggggtctggaggctcaacttactacgctgactccgtgaagggacggttcaccattagccgcgacaactccaagaacaccctctacctccaaatgaactccctgcgggccgaggataccgccgtctactactgcgccaaagtggaaggttcaggatcgctggactactggggacagggtactctcgtgaccgtgtcatcgggcggaggaggttccggcggtggcggctccggcggcggagggtcggagatcgtgatgacccagagccctggtactctgagcctttcgccgggagaaagggccaccctgtcctgccgcgcttcccaatccgtgtcctccgcgtacttggcgtggtaccagcagaagccgggacagccccctcggctgctgatcagcggggccagcacccgggcaaccggaatcccagacagattcgggggttccggcagcggcacagatttcaccctgactatttcgaggttggagcccgaggactttgcggtgtattactgtcagcactacgggtcgtcctttaatggctccagcctgttcacgttcggacaggggacccgcctggaaatcaag

SEQ ID NO: 359 - DNA, 723 bp, synthetic construct
  misc_feature 1..723: note = source = /note="Description of Artificial Sequence: Synthetic polynucleotide"
  source 1..723: mol_type = other DNA
gaagtgcaactggtggaaaccggtggcggcctggtgcagcctggaggatcattgaggctgtcatgcgcggccagcggtattaccttctcccggtaccccatgtcctgggtcagacaggccccggggaaagggcttgaatgggtgtccgggatctcggactccggtgtcagcacttactacgccgactccgccaagggacgcttcaccatttcccgggacaactcgaagaacaccctgttcctccaaatgagctccctccgggacgaggatactgcagtgtactactgcgtgacccgcgccgggtccgaggcgtctgacatttggggacagggcactatggtcaccgtgtcgtccggcggagggggctcgggaggcggtggcagcggaggaggagggtccgagatcgtgctgacccaatccccggccaccctctcgctgagccctggagaaagggcaaccttgtcctgtcgcgcgagccagtccgtgagcaactccctggcctggtaccagcagaagcccggacaggctccgagacttctgatctacgacgcttcgagccgggccactggaatccccgaccgcttttcggggtccggctcaggaaccgatttcaccctgacaatctcacggctggagccagaggatttcgccatctattactgccagcagttcggtacttcctccggcctgactttcggaggcggcacgaagctcgaaatcaag

SEQ ID NO: 360 - DNA, 744 bp, synthetic construct
  misc_feature 1..744: note = source = /note="Description of Artificial Sequence: Synthetic polynucleotide"
  source 1..744: mol_type = other DNA
caagtgcagctcgtggaatcgggtggcggactggtgcagccggggggctcacttagactgtcctgcgcggccagcggattcactttctcctcctacgccatgtcctgggtcagacaggcccctggaaagggcctggaatgggtgtccgcaatcagcggcagcggcggctcgacctattacgcggattcagtgaagggcagattcaccatttcccgggacaacgccaagaactccttgtaccttcaaatgaactccctccgcgcggaagataccgcaatctactactgcgctcgggccacttacaagagggaactgcgctactactacgggatggacgtctggggccagggaaccatggtcaccgtgtccagcggaggaggaggatcgggaggaggcggtagcgggggtggagggtcggagatcgtgatgacccagtcccccggcactgtgtcgctgtcccccggcgaacgggccaccctgtcatgtcgggccagccagtcagtgtcgtcaagcttcctcgcctggtaccagcagaaaccgggacaagctccccgcctgctgatctacggagccagcagccgggccaccggtattcctgaccggttctccggttcggggtccgggaccgactttactctgactatctctcgcctcgagccagaggactccgccgtgtattactgccagcagtaccactcctccccgtcctggacgttcggacagggcacaaggctggagattaag

SEQ ID NO: 361 - DNA, 744 bp, synthetic construct
  misc_feature 1..744: note = source = /note="Description of Artificial Sequence: Synthetic polynucleotide"
  source 1..744: mol_type = other DNA
gaggtgcagcttgtggaaaccggtggcggactggtgcagcccggaggaagcctcaggctgtcctgcgccgcgtccggcttcaccttctcctcgtacgccatgtcctgggtccgccaggcccccggaaagggcctggaatgggtgtccgccatctctggaagcggaggttccacgtactacgcggacagcgtcaagggaaggttcacaatctcccgcgataattcgaagaacactctgtaccttcaaatgaacaccctgaaggccgaggacactgctgtgtactactgcgcacgggccacctacaagagagagctccggtactactacggaatggacgtctggggccagggaactactgtgaccgtgtcctcgggagggggtggctccggggggggcggctccggcggaggcggttccgagattgtgctgacccagtcaccttcaactctgtcgctgtccccgggagagagcgctactctgagctgccgggccagccagtccgtgtccaccaccttcctcgcctggtatcagcagaagccggggcaggcaccacggctcttgatctacgggtcaagcaacagagcgaccggaattcctgaccgcttctcggggagcggttcaggcaccgacttcaccctgactatccggcgcctggaacccgaagatttcgccgtgtattactgtcaacagtaccactcctcgccgtcctggacctttggccaaggaaccaaagtggaaatcaag

SEQ ID NO: 362 - DNA, 717 bp, synthetic construct
  misc_feature 1..717: note = source = /note="Description of Artificial Sequence: Synthetic polynucleotide"
  source 1..717: mol_type = other DNA
gaagtgcagctcgtggaaactggaggtggactcgtgcagcctggacggtcgctgcggctgagctgcgctgcatccggcttcaccttcgacgattatgccatgcactgggtcagacaggcgccagggaagggacttgagtgggtgtccggtatcagctggaatagcggctcaatcggatacgcggactccgtgaagggaaggttcaccatttcccgcgacaacgccaagaactccctgtacttgcaaatgaacagcctccgggatgaggacactgccgtgtactactgcgcccgcgtcggaaaagctgtgcccgacgtctggggccagggaaccactgtgaccgtgtccagcggcgggggtggatcgggcggtggagggtccggtggagggggctcagatattgtgatgacccagaccccctcgtccctgtccgcctcggtcggcgaccgcgtgactatcacatgtagagcctcgcagagcatctccagctacctgaactggtatcagcagaagccggggaaggccccgaagctcctgatctacgcggcatcatcactgcaatcgggagtgccgagccggttttccgggtccggctccggcaccgacttcacgctgaccatttcttccctgcaacccgaggacttcgccacttactactgccagcagtcctactccaccccttactccttcggccaaggaaccaggctggaaatcaag

SEQ ID NO: 363 - DNA, 738 bp, synthetic construct
  misc_feature 1..738: note = source = /note="Description of Artificial Sequence: Synthetic polynucleotide"
  source 1..738: mol_type = other DNA
gaagtgcagctcgtggagagcgggggaggattggtgcagcccggaaggtccctgcggctctcctgcactgcgtctggcttcaccttcgacgactacgcgatgcactgggtcagacagcgcccgggaaagggcctggaatgggtcgcctcaatcaactggaagggaaactccctggcctatggcgacagcgtgaagggccgcttcgccatttcgcgcgacaacgccaagaacaccgtgtttctgcaaatgaattccctgcggaccgaggataccgctgtgtactactgcgccagccaccagggcgtggcatactataactacgccatggacgtgtggggaagagggacgctcgtcaccgtgtcctccgggggcggtggatcgggtggaggaggaagcggtggcgggggcagcgaaatcgtgctgactcagagcccgggaactctttcactgtccccgggagaacgggccactctctcgtgccgggccacccagtccatcggctcctccttccttgcctggtaccagcagaggccaggacaggcgccccgcctgctgatctacggtgcttcccaacgcgccactggcattcctgaccggttcagcggcagagggtcgggaaccgatttcacactgaccatttcccgggtggagcccgaagattcggcagtctactactgtcagcattacgagtcctccccttcatggaccttcggtcaagggaccaaagtggagatcaag

SEQ ID NO: 364 - DNA, 723 bp, synthetic construct
  misc_feature 1..723: note = source = /note="Description of Artificial Sequence: Synthetic polynucleotide"
  source 1..723: mol_type = other DNA
gaggtgcagttggtcgaaagcgggggcgggcttgtgcagcctggcggatcactgcggctgtcctgcgcggcatcaggcttcacgttttcttcctacgccatgtcctgggtgcgccaggcccctggaaagggactggaatgggtgtccgcgatttcggggtccggcgggagcacctactacgccgattccgtgaagggccgcttcactatctcgcgggacaactccaagaacaccctctacctccaaatgaatagcctgcgggccgaggataccgccgtctactattgcgctaaggtcgtgcgcgacggaatggacgtgtggggacagggtaccaccgtgacagtgtcctcggggggaggcggtagcggcggaggaggaagcggtggtggaggttccgagattgtgctgactcaatcacccgcgaccctgagcctgtcccccggcgaaagggccactctgtcctgtcgggccagccaatcagtctcctcctcgtacctggcctggtaccagcagaagccaggacaggctccgagactccttatctatggcgcatcctcccgcgccaccggaatcccggataggttctcgggaaacggatcggggaccgacttcactctcaccatctcccggctggaaccggaggacttcgccgtgtactactgccagcagtacggcagcccgcctagattcactttcggccccggcaccaaagtggacatcaag

SEQ ID NO: 365 - DNA, 726 bp, synthetic construct
  misc_feature 1..726: note = source = /note="Description of Artificial Sequence: Synthetic polynucleotide"
  source 1..726: mol_type = other DNA
gaagtgcagctgctggagtccggcggtggattggtgcaaccggggggatcgctcagactgtcctgtgcggcgtcaggcttcaccttctcgagctacgccatgtcatgggtcagacaggcccctggaaagggtctggaatgggtgtccgccatttccgggagcgggggatctacatactacgccgatagcgtgaagggccgcttcaccatttcccgggacaactccaagaacactctctatctgcaaatgaactccctccgcgctgaggacactgccgtgtactactgcgccaaaatccctcagaccggcaccttcgactactggggacaggggactctggtcaccgtcagcagcggtggcggaggttcggggggaggaggaagcggcggcggagggtccgagattgtgctgacccagtcacccggcactttgtccctgtcgcctggagaaagggccaccctttcctgccgggcatcccaatccgtgtcctcctcgtacctggcctggtaccagcagaggcccggacaggccccacggcttctgatctacggagcaagcagccgcgcgaccggtatcccggaccggttttcgggctcgggctcaggaactgacttcaccctcaccatctcccgcctggaacccgaagatttcgctgtgtattactgccagcactacggcagctccccgtcctggacgttcggccagggaactcggctggagatcaag

SEQ ID NO: 366 - DNA, 744 bp, synthetic construct
  misc_feature 1..744: note = source = /note="Description of Artificial Sequence: Synthetic polynucleotide"
  source 1..744: mol_type = other DNA
gaagtgcaactggtggaaaccggtggaggactcgtgcagcctggcggcagcctccggctgagctgcgccgcttcgggattcaccttttcctcctacgcgatgtcttgggtcagacaggcccccggaaaggggctggaatgggtgtcagccatctccggctccggcggatcaacgtactacgccgactccgtgaaaggccggttcaccatgtcgcgcgagaatgacaagaactccgtgttcctgcaaatgaactccctgagggtggaggacaccggagtgtactattgtgcgcgcgccaactacaagagagagctgcggtactactacggaatggacgtctggggacagggaactatggtgaccgtgtcatccggtggagggggaagcggcggtggaggcagcgggggcgggggttcagaaattgtcatgacccagtccccgggaactctttccctctcccccggggaatccgcgactttgtcctgccgggccagccagcgcgtggcctcgaactacctcgcatggtaccagcataagccaggccaagccccttccctgctgatttccggggctagcagccgcgccactggcgtgccggataggttctcgggaagcggctcgggtaccgatttcaccctggcaatctcgcggctggaaccggaggattcggccgtgtactactgccagcactatgactcatccccctcctggacattcggacagggcaccaaggtcgagatcaag

SEQ ID NO: 367 - DNA, 732 bp, synthetic construct
  misc_feature 1..732: note = source = /note="Description of Artificial Sequence: Synthetic polynucleotide"
  source 1..732: mol_type = other DNA
gaagtgcagctgctcgaaaccggtggagggctggtgcagccagggggctccctgaggctttcatgcgccgctagcggattctccttctcctcttacgccatgtcgtgggtccgccaagcccctggaaaaggcctggaatgggtgtccgcgatttccgggagcggaggttcgacctattacgccgactccgtgaagggccgctttaccatctcccgggataactccaagaacactctgtacctccaaatgaactcgctgagagccgaggacaccgccgtgtattactgcgcgaaggcgctggtcggcgcgactggggcattcgacatctggggacagggaactcttgtgaccgtgtcgagcggaggcggcggctccggcggaggagggagcgggggcggtggttccgaaatcgtgttgactcagtccccgggaaccctgagcttgtcacccggggagcgggccactctctcctgtcgcgcctcccaatcgctctcatccaatttcctggcctggtaccagcagaagcccggacaggccccgggcctgctcatctacggcgcttcaaactgggcaacgggaacccctgatcggttcagcggaagcggatcgggtactgactttaccctgaccatcaccagactggaaccggaggacttcgccgtgtactactgccagtactacggcacctcccccatgtacacattcggacagggtaccaaggtcgagattaag

SEQ ID NO: 368 - DNA, 733 bp, synthetic construct
  misc_feature 1..733: note = source = /note="Description of Artificial Sequence: Synthetic polynucleotide"
  source 1..733: mol_type = other DNA
gaagtgcagctgcttgagagcggtggaggtctggtgcagcccgggggatcactgcgcctgtcctgtgccgcgtccggtttcactttctcctcgtacgccatgtcgtgggtcagacaggcaccgggaaagggactggaatgggtgtcagccatttcgggttcggggggcagcacctactacgctgactccgtgaagggccggttcaccatttcccgcgacaactccaagaacaccttgtacctccaaatgaactccctgcgggccgaagataccgccgtgtattactgcgtgctgtggttcggagagggattcgacccgtggggacaaggaacactcgtgactgtgtcatccggcggaggcggcagcggtggcggcggttccggcggcggcggatctgacatcgtgttgacccagtcccctctgagcctgccggtcactcctggcgaaccagccagcatctcctgccggtcgagccagtccctcctgcactccaatgggtacaactacctcgattggtatctgcaaaagccgggccagagcccccagctgctgatctaccttgggtcaaaccgcgcttccggggtgcctgatagattctccgggtccgggagcggaaccgactttaccctgaaaatctcgagggtggaggccgaggacgtcggagtgtactactgcatgcaggcgctccagactcccctgaccttcggaggaggaacgaaggtcgacatcaaga

SEQ ID NO: 369 - DNA, 753 bp, synthetic construct
  misc_feature 1..753: note = source = /note="Description of Artificial Sequence: Synthetic polynucleotide"
  source 1..753: mol_type = other DNA
caagtgcagctcgtggagtcaggcggaggactggtgcagcccgggggctccctgagactttcctgcgcggcatcgggttttaccttctcctcctatgctatgtcctgggtgcgccaggccccgggaaagggactggaatgggtgtccgcaatcagcggtagcgggggctcaacatactacgccgactccgtcaagggtcgcttcactatttcccgggacaactccaagaataccctgtacctccaaatgaacagcctcagggccgaggatactgccgtgtactactgcgccaaagtcggatacgatagctccggttactaccgggactactacggaatggacgtgtggggacagggcaccaccgtgaccgtgtcaagcggcggaggcggttcaggagggggaggctccggcggtggagggtccgaaatcgtcctgactcagtcgcctggcactctgtcgttgtccccgggggagcgcgctaccctgtcgtgtcgggcgtcgcagtccgtgtcgagctcctacctcgcgtggtaccagcagaagcccggacaggcccctagacttctgatctacggcacttcttcacgcgccaccgggatcagcgacaggttcagcggctccggctccgggaccgacttcaccctgaccattagccggctggagcctgaagatttcgccgtgtattactgccaacactacggaaactcgccgccaaagttcacgttcggacccggaaccaagctggaaatcaag

SEQ ID NO: 370 - DNA, 739 bp, synthetic construct
  misc_feature 1..739: note = source = /note="Description of Artificial Sequence: Synthetic polynucleotide"
  source 1..739: mol_type = other DNA
gaagtccaactggtggagtccgggggagggctcgtgcagcccggaggcagccttcggctgtcgtgcgccgcctccgggttcacgttctcatcctacgcgatgtcgtgggtcagacaggcaccaggaaagggactggaatgggtgtccgccattagcggctccggcggtagcacctactatgccgactcagtgaagggaaggttcactatctcccgcgacaacagcaagaacaccctgtacctccaaatgaactctctgcgggccgaggataccgcggtgtactattgcgccaagatgggttggtccagcggatacttgggagccttcgacatttggggacagggcactactgtgaccgtgtcctccgggggtggcggatcgggaggcggcggctcgggtggagggggttccgaaatcgtgttgacccagtcaccgggaaccctctcgctgtccccgggagaacgggctacactgtcatgtagagcgtcccagtccgtggcttcctcgttcctggcctggtaccagcagaagccgggacaggcaccccgcctgctcatctacggagccagcggccgggcgaccggcatccctgaccgcttctccggttccggctcgggcaccgactttactctgaccattagcaggcttgagcccgaggattttgccgtgtactactgccaacactacggggggagccctcgcctgaccttcggaggcggaactaaggtcgatatcaaaa

SEQ ID NO: 371 - protein, 121 aa, synthetic construct
  REGION 1..121: note = source = /note="Description of Artificial Sequence: Synthetic polypeptide"
QVQLQESGPGLVKPSETLSLTCTVSGGSISSSYYYWGWIRQPPGKGLEWIGSIYYSGSAYYNPSLKSRVTISVDTSKNQFSLRLSSVTAADTAVYYCARHWQEWPDAFDIWGQGTMVTVSS

SEQ ID NO: 372 - protein, 123 aa, synthetic construct
  REGION 1..123: note = source = /note="Description of Artificial Sequence: Synthetic polypeptide"
QVNLRESGPALVKPTQTLTLTCTFSGFSLRTSGMCVSWIRQPPGKALEWLARIDWDEDKFYSTSLKTRLTISKDTSDNQVVLRMTNMDPADTATYYCARSGAGGTSATAFDIWGPGTMVTVSS

SEQ ID NO: 373 - protein, 119 aa, synthetic construct
  REGION 1..119: note = source = /note="Description of Artificial Sequence: Synthetic polypeptide"
EVQLVESGGGLVKPGGSLRLSCAASGFTFSSYSMNWVRQAPGKGLEWVSSISSSSSYIYYADSVKGRFTISRDNAKNSLYLQMNSLRAEDTAVYYCAKTIAAVYAFDIWGQGTTVTVSS

SEQ ID NO: 374 - protein, 117 aa, synthetic construct
  REGION 1..117: note = source = /note="Description of Artificial Sequence: Synthetic polypeptide"
EVQLVESGGGLVKPGGSLRLSCAASGFTFSDYYMSWIRQAPGKGLEWVSYISSSGSTIYYADSVKGRFTISRDNAKNSLYLQMNSLRAEDTAVYYCARDLRGAFDIWGQGTMVTVSS

SEQ ID NO: 375 - protein, 120 aa, synthetic construct
  REGION 1..120: note = source = /note="Description of Artificial Sequence: Synthetic polypeptide"
QVQLVQSGAEVKKPGASVKVSCKPSGYTVTSHYIHWVRRAPGQGLEWMGMINPSGGVTAYSQTLQGRVTMTSDTSSSTVYMELSSLRSEDTAMYYCAREGSGSGWYFDFWGRGTLVTVSS

SEQ ID NO: 376 - protein, 123 aa, synthetic construct
  REGION 1..123: note = source = /note="Description of Artificial Sequence: Synthetic polypeptide"
QVQLQESGPGLVKPSQTLSLTCTVSGGSISSGGYYWSWIRQHPGKGLEWIGYIYYSGSTYYNPSLKSRVTISVDTSKNQFSLKLSSVTAADTAVYYCARAGIAARLRGAFDIWGQGTMVTVSS

SEQ ID NO: 377 - protein, 129 aa, synthetic construct
  REGION 1..129: note = source = /note="Description of Artificial Sequence: Synthetic polypeptide"
QVQLVQSGAEVKKPGSSVKVSCKASGGTFSSYAISWVRQAPGQGLEWMGGIIPIFGTANYAQKFQGRVTITADESTSTAYMELSSLRSEDTAVYYCARRGGYQLLRWDVGLLRSAFDIWGQGTMVTVSS

SEQ ID NO: 378 - protein, 125 aa, synthetic construct
  REGION 1..125: note = source = /note="Description of Artificial Sequence: Synthetic polypeptide"
EVQLQQSGPGLVKPSQTLSLTCAISGDSVSSNSAAWNWIRQSPSRGLEWLGRTYYRSKWYSFYAISLKSRIIINPDTSKNQFSLQLKSVTPEDTAVYYCARSSPEGLFLYWFDPWGQGTLVTVSS

SEQ ID NO: 379 - protein, 118 aa, synthetic construct
  REGION 1..118: note = source = /note="Description of Artificial Sequence: Synthetic polypeptide"
EVQLVESGGGLVQPGGSLRLSCAASGFTFSSYAMSWVRQAPGKGLEWVSAISGSGGSTYYADSVKGRFTISRDNSKNTLYLQMNSLRAEDTAVYYCAKVEGSGSLDYWGQGTLVTVSS

SEQ ID NO: 380 - protein, 118 aa, synthetic construct
  REGION 1..118: note = source = /note="Description of Artificial Sequence: Synthetic polypeptide"
EVQLVETGGGLVQPGGSLRLSCAASGITFSRYPMSWVRQAPGKGLEWVSGISDSGVSTYYADSAKGRFTISRDNSKNTLFLQMSSLRDEDTAVYYCVTRAGSEASDIWGQGTMVTVSS

SEQ ID NO: 381 - protein, 124 aa, synthetic construct
  REGION 1..124: note = source = /note="Description of Artificial Sequence: Synthetic polypeptide"
QVQLVESGGGLVQPGGSLRLSCAASGFTFSSYAMSWVRQAPGKGLEWVSAISGSGGSTYYADSVKGRFTISRDNAKNSLYLQMNSLRAEDTAIYYCARATYKRELRYYYGMDVWGQGTMVTVSS

SEQ ID NO: 382 - protein, 124 aa, synthetic construct
  REGION 1..124: note = source = /note="Description of Artificial Sequence: Synthetic polypeptide"
EVQLVETGGGLVQPGGSLRLSCAASGFTFSSYAMSWVRQAPGKGLEWVSAISGSGGSTYYADSVKGRFTISRDNSKNTLYLQMNTLKAEDTAVYYCARATYKRELRYYYGMDVWGQGTTVTVSS

SEQ ID NO: 383 - protein, 117 aa, synthetic construct
  REGION 1..117: note = source = /note="Description of Artificial Sequence: Synthetic polypeptide"
EVQLVETGGGLVQPGRSLRLSCAASGFTFDDYAMHWVRQAPGKGLEWVSGISWNSGSIGYADSVKGRFTISRDNAKNSLYLQMNSLRDEDTAVYYCARVGKAVPDVWGQGTTVTVSS

SEQ ID NO: 384 - protein, 122 aa, synthetic construct
  REGION 1..122: note = source = /note="Description of Artificial Sequence: Synthetic polypeptide"
EVQLVESGGGLVQPGRSLRLSCTASGFTFDDYAMHWVRQRPGKGLEWVASINWKGNSLAYGDSVKGRFAISRDNAKNTVFLQMNSLRTEDTAVYYCASHQGVAYYNYAMDVWGRGTLVTVSS

SEQ ID NO: 385 - protein, 117 aa, synthetic construct
  REGION 1..117: note = source = /note="Description of Artificial Sequence: Synthetic polypeptide"
EVQLVESGGGLVQPGGSLRLSCAASGFTFSSYAMSWVRQAPGKGLEWVSAISGSGGSTYYADSVKGRFTISRDNSKNTLYLQMNSLRAEDTAVYYCAKVVRDGMDVWGQGTTVTVSS

SEQ ID NO: 386 - protein, 118 aa, synthetic construct
  REGION 1..118: note = source = /note="Description of Artificial Sequence: Synthetic polypeptide"
EVQLLESGGGLVQPGGSLRLSCAASGFTFSSYAMSWVRQAPGKGLEWVSAISGSGGSTYYADSVKGRFTISRDNSKNTLYLQMNSLRAEDTAVYYCAKIPQTGTFDYWGQGTLVTVSS

SEQ ID NO: 387 - protein, 124 aa, synthetic construct
  REGION 1..124: note = source = /note="Description of Artificial Sequence: Synthetic polypeptide"
EVQLVETGGGLVQPGGSLRLSCAASGFTFSSYAMSWVRQAPGKGLEWVSAISGSGGSTYYADSVKGRFTMSRENDKNSVFLQMNSLRVEDTGVYYCARANYKRELRYYYGMDVWGQGTMVTVSS

SEQ ID NO: 388 - protein, 120 aa, synthetic construct
  REGION 1..120: note = source = /note="Description of Artificial Sequence: Synthetic polypeptide"
EVQLLETGGGLVQPGGSLRLSCAASGFSFSSYAMSWVRQAPGKGLEWVSAISGSGGSTYYADSVKGRFTISRDNSKNTLYLQMNSLRAEDTAVYYCAKALVGATGAFDIWGQGTLVTVSS

SEQ ID NO: 389 - protein, 117 aa, synthetic construct
  REGION 1..117: note = source = /note="Description of Artificial Sequence: Synthetic polypeptide"
EVQLLESGGGLVQPGGSLRLSCAASGFTFSSYAMSWVRQAPGKGLEWVSAISGSGGSTYYADSVKGRFTISRDNSKNTLYLQMNSLRAEDTAVYYCVLWFGEGFDPWGQGTLVTVSS

SEQ ID NO: 390 - protein, 126 aa, synthetic construct
  REGION 1..126: note = source = /note="Description of Artificial Sequence: Synthetic polypeptide"
QVQLVESGGGLVQPGGSLRLSCAASGFTFSSYAMSWVRQAPGKGLEWVSAISGSGGSTYYADSVKGRFTISRDNSKNTLYLQMNSLRAEDTAVYYCAKVGYDSSGYYRDYYGMDVWGQGTTVTVSS

SEQ ID NO: 391 - protein, 122 aa, synthetic construct
  REGION 1..122: note = source = /note="Description of Artificial Sequence: Synthetic polypeptide"
EVQLVESGGGLVQPGGSLRLSCAASGFTFSSYAMSWVRQAPGKGLEWVSAISGSGGSTYYADSVKGRFTISRDNSKNTLYLQMNSLRAEDTAVYYCAKMGWSSGYLGAFDIWGQGTTVTVSS

SEQ ID NO: 392 - protein, 107 aa, synthetic construct
  REGION 1..107: note = source = /note="Description of Artificial Sequence: Synthetic polypeptide"
ETTLTQSPAFMSATPGDKVIISCKASQDIDDAMNWYQQKPGEAPLFIIQSATSPVPGIPPRFSGSGFGTDFSLTINNIESEDAAYYFCLQHDNFPLTFGQGTKLEIK

SEQ ID NO: 393 - protein, 107 aa, synthetic construct
  REGION 1..107: note = source = /note="Description of Artificial Sequence: Synthetic polypeptide"
DIQMTQSPSSLSASVGDRVTITCRASQDIYNNLAWFQLKPGSAPRSLMYAANKSQSGVPSRFSGSASGTDFTLTISSLQPEDFATYYCQHYYRFPYSFGQGTKLEIK

SEQ ID NO: 394 - protein, 112 aa, synthetic construct
  REGION 1..112: note = source = /note="Description of Artificial Sequence: Synthetic polypeptide"
EIVLTQSPLSLPVTPEEPASISCRSSQSLLHSNGYNYLDWYLQKPGQSPQLLIYLGSNRASGVPDRFSGSGSGTDFTLKISRVEAEDVGVYYCMQALQTPYTFGQGTKLEIK

SEQ ID NO: 395 - protein, 108 aa, synthetic construct
  REGION 1..108: note = source = /note="Description of Artificial Sequence: Synthetic polypeptide"
SYVLTQSPSVSAAPGYTATISCGGNNIGTKSVHWYQQKPGQAPLLVIRDDSVRPSKIPGRFSGSNSGNMATLTISGVQAGDEADFYCQVWDSDSEHVVFGGGTKLTVL

SEQ ID NO: 396 - protein, 106 aa, synthetic construct
  REGION 1..106: note = source = /note="Description of Artificial Sequence: Synthetic polypeptide"
SYVLTQPPSVSVSPGQTASITCSGDGLSKKYVSWYQQKAGQSPVVLISRDKERPSGIPDRFSGSNSADTATLTISGTQAMDEADYYCQAWDDTTVVFGGGTKLTVL

SEQ ID NO: 397 - protein, 107 aa, synthetic construct
  REGION 1..107: note = source = /note="Description of Artificial Sequence: Synthetic polypeptide"
DIVMTQSPSSVSASVGDRVIITCRASQGIRNWLAWYQQKPGKAPNLLIYAASNLQSGVPSRFSGSGSGADFTLTISSLQPEDVATYYCQKYNSAPFTFGPGTKVDIK

SEQ ID NO: 398 - protein, 109 aa, synthetic construct
  REGION 1..109: note = source = /note="Description of Artificial Sequence: Synthetic polypeptide"
SYVLTQPPSVSVAPGQTARITCGGNNIGSKSVHWYQQKPGQAPVLVLYGKNNRPSGVPDRFSGSRSGTTASLTITGAQAEDEADYYCSSRDSSGDHLRVFGTGTKVTVL

SEQ ID NO: 399 - protein, 108 aa, synthetic construct
  REGION 1..108: note = source = /note="Description of Artificial Sequence: Synthetic polypeptide"
SSELTQDPAVSVALGQTIRITCQGDSLGNYYATWYQQKPGQAPVLVIYGTNNRPSGIPDRFSASSSGNTASLTITGAQAEDEADYYCNSRDSSGHHLLFGTGTKVTVL

SEQ ID NO: 400 - protein, 113 aa, synthetic construct
  REGION 1..113: note = source = /note="Description of Artificial Sequence: Synthetic polypeptide"
EIVMTQSPGTLSLSPGERATLSCRASQSVSSAYLAWYQQKPGQPPRLLISGASTRATGIPDRFGGSGSGTDFTLTISRLEPEDFAVYYCQHYGSSFNGSSLFTFGQGTRLEIK

SEQ ID NO: 401 - protein, 108 aa, synthetic construct
  REGION 1..108: note = source = /note="Description of Artificial Sequence: Synthetic polypeptide"
EIVLTQSPATLSLSPGERATLSCRASQSVSNSLAWYQQKPGQAPRLLIYDASSRATGIPDRFSGSGSGTDFTLTISRLEPEDFAIYYCQQFGTSSGLTFGGGTKLEIK

SEQ ID NO: 402 - protein, 109 aa, synthetic construct
  REGION 1..109: note = source = /note="Description of Artificial Sequence: Synthetic polypeptide"
EIVMTQSPGTVSLSPGERATLSCRASQSVSSSFLAWYQQKPGQAPRLLIYGASSRATGIPDRFSGSGSGTDFTLTISRLEPEDSAVYYCQQYHSSPSWTFGQGTRLEIK

SEQ ID NO: 403 - protein, 109 aa, synthetic construct
  REGION 1..109: note = source = /note="Description of Artificial Sequence: Synthetic polypeptide"
EIVLTQSPSTLSLSPGESATLSCRASQSVSTTFLAWYQQKPGQAPRLLIYGSSNRATGIPDRFSGSGSGTDFTLTIRRLEPEDFAVYYCQQYHSSPSWTFGQGTKVEIK

SEQ ID NO: 404 - protein, 107 aa, synthetic construct
  REGION 1..107: note = source = /note="Description of Artificial Sequence: Synthetic polypeptide"
DIVMTQTPSSLSASVGDRVTITCRASQSISSYLNWYQQKPGKAPKLLIYAASSLQSGVPSRFSGSGSGTDFTLTISSLQPEDFATYYCQQSYSTPYSFGQGTRLEIK

SEQ ID NO: 405 - protein, 109 aa, synthetic construct
  REGION 1..109: note = source = /note="Description of Artificial Sequence: Synthetic polypeptide"
EIVLTQSPGTLSLSPGERATLSCRATQSIGSSFLAWYQQRPGQAPRLLIYGASQRATGIPDRFSGRGSGTDFTLTISRVEPEDSAVYYCQHYESSPSWTFGQGTKVEIK

SEQ ID NO: 406 - protein, 109 aa, synthetic construct
  REGION 1..109: note = source = /note="Description of Artificial Sequence: Synthetic polypeptide"
EIVLTQSPATLSLSPGERATLSCRASQSVSSSYLAWYQQKPGQAPRLLIYGASSRATGIPDRFSGNGSGTDFTLTISRLEPEDFAVYYCQQYGSPPRFTFGPGTKVDIK

SEQ ID NO: 407 - protein, 109 aa, synthetic construct
  REGION 1..109: note = source = /note="Description of Artificial Sequence: Synthetic polypeptide"
EIVLTQSPGTLSLSPGERATLSCRASQSVSSSYLAWYQQRPGQAPRLLIYGASSRATGIPDRFSGSGSGTDFTLTISRLEPEDFAVYYCQHYGSSPSWTFGQGTRLEIK

SEQ ID NO: 408 - protein, 109 aa, synthetic construct
  REGION 1..109: note = source = /note="Description of Artificial Sequence: Synthetic polypeptide"
EIVMTQSPGTLSLSPGESATLSCRASQRVASNYLAWYQHKPGQAPSLLISGASSRATGVPDRFSGSGSGTDFTLAISRLEPEDSAVYYCQHYDSSPSWTFGQGTKVEIK

SEQ ID NO: 409 - protein, 109 aa, synthetic construct
  REGION 1..109: note = source = /note="Description of Artificial Sequence: Synthetic polypeptide"
EIVLTQSPGTLSLSPGERATLSCRASQSLSSNFLAWYQQKPGQAPGLLIYGASNWATGTPDRFSGSGSGTDFTLTITRLEPEDFAVYYCQYYGTSPMYTFGQGTKVEIK

SEQ ID NO: 410 - protein, 112 aa, synthetic construct
  REGION 1..112: note = source = /note="Description of Artificial Sequence: Synthetic polypeptide"
DIVLTQSPLSLPVTPGEPASISCRSSQSLLHSNGYNYLDWYLQKPGQSPQLLIYLGSNRASGVPDRFSGSGSGTDFTLKISRVEAEDVGVYYCMQALQTPLTFGGGTKVDIK

SEQ ID NO: 411 - protein, 110 aa, synthetic construct
  REGION 1..110: note = source = /note="Description of Artificial Sequence: Synthetic polypeptide"
EIVLTQSPGTLSLSPGERATLSCRASQSVSSSYLAWYQQKPGQAPRLLIYGTSSRATGISDRFSGSGSGTDFTLTISRLEPEDFAVYYCQHYGNSPPKFTFGPGTKLEIK

SEQ ID NO: 412 - protein, 109 aa, synthetic construct
  REGION 1..109: note = source = /note="Description of Artificial Sequence: Synthetic polypeptide"
EIVLTQSPGTLSLSPGERATLSCRASQSVASSFLAWYQQKPGQAPRLLIYGASGRATGIPDRFSGSGSGTDFTLTISRLEPEDFAVYYCQHYGGSPRLTFGGGTKVDIK

SEQ ID NO: 413-454 - skipped (42 entries)

SEQ ID NO: 455 - protein, 122 aa, synthetic construct
  REGION 1..122: note = source = /note="Description of Artificial Sequence: Synthetic polypeptide"
QIQLVQSGPDLKKPGETVKLSCKASGYTFTNFGMNWVKQAPGKGFKWMAWINTYTGESYFADDFKGRFAFSVETSATTAYLQINNLKTEDTATYFCARGEIYYGYDGGFAYWGQGTLVTVSA

SEQ ID NO: 456 - protein, 117 aa, synthetic construct
  REGION 1..117: note = source = /note="Description of Artificial Sequence: Synthetic polypeptide"
QIQLVQSGPELKKPGETVKISCKASGYTFTDYSINWVKRAPGKGLKWMGWINTETREPAYAYDFRGRFAFSLETSASTAYLQINNLKYEDTATYFCALDYSYAMDYWGQGTSVTVSS

SEQ ID NO: 457 - protein, 117 aa, synthetic construct
  REGION 1..117: note = source = /note="Description of Artificial Sequence: Synthetic polypeptide"
QIQLVQSGPELKKPGETVKISCKASGYTFRHYSMNWVKQAPGKGLKWMGRINTESGVPIYADDFKGRFAFSVETSASTAYLVINNLKDEDTASYFCSNDYLYSLDFWGQGTALTVSS

SEQ ID NO: 458 - protein, 117 aa, synthetic construct
  REGION 1..117: note = source = /note="Description of Artificial Sequence: Synthetic polypeptide"
QIQLVQSGPELKKPGETVKISCKASGYTFTHYSMNWVKQAPGKGLKWMGRINTETGEPLYADDFKGRFAFSLETSASTAYLVINNLKNEDTATFFCSNDYLYSCDYWGQGTTLTVSS

SEQ ID NO: 459 - protein, 107 aa, synthetic construct
  REGION 1..107: note = source = /note="Description of Artificial Sequence: Synthetic polypeptide"
DVVMTQSHRFMSTSVGDRVSITCRASQDVNTAVSWYQQKPGQSPKLLIFSASYRYTGVPDRFTGSGSGADFTLTISSVQAEDLAVYYCQQHYSTPWTFGGGTKLDIK

SEQ ID NO: 460 - protein, 111 aa, synthetic construct
  REGION 1..111: note = source = /note="Description of Artificial Sequence: Synthetic polypeptide"
DIVLTQSPASLAMSLGKRATISCRASESVSVIGAHLIHWYQQKPGQPPKLLIYLASNLETGVPARFSGSGSGTDFTLTIDPVEEDDVAIYSCLQSRIFPRTFGGGTKLEIK

SEQ ID NO: 461 - protein, 111 aa, synthetic construct
  REGION 1..111: note = source = /note="Description of Artificial Sequence: Synthetic polypeptide"
DIVLTQSPPSLAMSLGKRATISCRASESVTILGSHLIYWYQQKPGQPPTLLIQLASNVQTGVPARFSGSGSRTDFTLTIDPVEEDDVAVYYCLQSRTIPRTFGGGTKLEIK

SEQ ID NO: 462 - protein, 111 aa, synthetic construct; identical to SEQ ID NO: 461
  REGION 1..111: note = source = /note="Description of Artificial Sequence: Synthetic polypeptide"

SEQ ID NO: 463 - protein, 244 aa, synthetic construct
  REGION 1..244: note = source = /note="Description of Artificial Sequence: Synthetic polypeptide"
QIQLVQSGPDLKKPGETVKLSCKASGYTFTNFGMNWVKQAPGKGFKWMAWINTYTGESYFADDFKGRFAFSVETSATTAYLQINNLKTEDTATYFCARGEIYYGYDGGFAYWGQGTLVTVSAGGGGSGGGGSGGGGSDVVMTQSHRFMSTSVGDRVSITCRASQDVNTAVSWYQQKPGQSPKLLIFSASYRYTGVPDRFTGSGSGADFTLTISSVQAEDLAVYYCQQHYSTPWTFGGGTKLDIK

SEQ ID NO: 464 - protein, 249 aa, synthetic construct
  REGION 1..249: note = source = /note="Description of Artificial Sequence: Synthetic polypeptide"
QIQLVQSGPELKKPGETVKISCKASGYTFTDYSINWVKRAPGKGLKWMGWINTETREPAYAYDFRGRFAFSLETSASTAYLQINNLKYEDTATYFCALDYSYAMDYWGQGTSVTVSSGGGGSGGGGSGGGGSQIQLVQSGPELKKPGETVKISCKASGYTFTDYSINWVKRAPGKGLKWMGWINTETREPAYAYDFRGRFAFSLETSASTAYLQINNLKYEDTATYFCALDYSYAMDYWGQGTSVTVSS

SEQ ID NO: 465 - protein, 243 aa, synthetic construct
  REGION 1..243: note = source = /note="Description of Artificial Sequence: Synthetic polypeptide"
QIQLVQSGPELKKPGETVKISCKASGYTFRHYSMNWVKQAPGKGLKWMGRINTESGVPIYADDFKGRFAFSVETSASTAYLVINNLKDEDTASYFCSNDYLYSLDFWGQGTALTVSSGGGGSGGGGSGGGGSDIVLTQSPPSLAMSLGKRATISCRASESVTILGSHLIYWYQQKPGQPPTLLIQLASNVQTGVPARFSGSGSRTDFTLTIDPVEEDDVAVYYCLQSRTIPRTFGGGTKLEIK

SEQ ID NO: 466 - protein, 243 aa, synthetic construct
  REGION 1..243: note = source = /note="Description of Artificial Sequence: Synthetic polypeptide"
QIQLVQSGPELKKPGETVKISCKASGYTFTHYSMNWVKQAPGKGLKWMGRINTETGEPLYADDFKGRFAFSLETSASTAYLVINNLKNEDTATFFCSNDYLYSCDYWGQGTTLTVSSGGGGSGGGGSGGGGSDIVLTQSPPSLAMSLGKRATISCRASESVTILGSHLIYWYQQKPGQPPTLLIQLASNVQTGVPARFSGSGSRTDFTLTIDPVEEDDVAVYYCLQSRTIPRTFGGGTKLEIK

SEQ ID NO: 467-583 - skipped (117 entries)

SEQ ID NO: 584 - protein, 5 aa, synthetic construct
  REGION 1..5: note = source = /note="Description of Artificial Sequence: Synthetic peptide"
NYAMS

SEQ ID NO: 585 - protein, 5 aa, synthetic construct
  REGION 1..5: note = source = /note="Description of Artificial Sequence: Synthetic peptide"
DYAMH

SEQ ID NO: 586 - protein, 5 aa, synthetic construct
  REGION 1..5: note = source = /note="Description of Artificial Sequence: Synthetic peptide"
NHGMS

SEQ ID NO: 587 - protein, 5 aa, synthetic construct
  REGION 1..5: note = source = /note="Description of Artificial Sequence: Synthetic peptide"
NFGIN

SEQ ID NO: 588 - protein, 5 aa, synthetic construct
  REGION 1..5: note = source = /note="Description of Artificial Sequence: Synthetic peptide"
SDAMT

SEQ ID NO: 589 - protein, 5 aa, synthetic construct
  REGION 1..5: note = source = /note="Description of Artificial Sequence: Synthetic peptide"
NYGIT

SEQ ID NO: 590 - protein, 5 aa, synthetic construct
  REGION 1..5: note = source = /note="Description of Artificial Sequence: Synthetic peptide"
NHGMS

SEQ ID NO: 591 - protein, 5 aa, synthetic construct
  REGION 1..5: note = source = /note="Description of Artificial Sequence: Synthetic peptide"
NHGMS

SEQ ID NO: 592 - protein, 5 aa, synthetic construct
  REGION 1..5: note = source = /note="Description of Artificial Sequence: Synthetic peptide"
NHGMS

SEQ ID NO: 593 - protein, 5 aa, synthetic construct
  REGION 1..5: note = source = /note="Description of Artificial Sequence: Synthetic peptide"
DYYMS

SEQ ID NO: 594 - protein, 5 aa, synthetic construct
  REGION 1..5: note = source = /note="Description of Artificial Sequence: Synthetic peptide"
NHGMS

SEQ ID NO: 595 - protein, 5 aa, synthetic construct
  REGION 1..5: note = source = /note="Description of Artificial Sequence: Synthetic peptide"
DYYMS

SEQ ID NO: 596 - protein, 5 aa, synthetic construct
  REGION 1..5: note = source = /note="Description of Artificial Sequence: Synthetic peptide"
NHGMS

SEQ ID NO: 597 - protein, 5 aa, synthetic construct
  REGION 1..5: note = source = /note="Description of Artificial Sequence: Synthetic peptide"
NHGMS

SEQ ID NO: 598 - protein, 5 aa, synthetic construct
  REGION 1..5: note = source = /note="Description of Artificial Sequence: Synthetic peptide"
NHGMS

SEQ ID NO: 599 - protein, 7 aa, synthetic construct
  REGION 1..7: note = source = /note="Description of Artificial Sequence: Synthetic peptide"
SSYYYWG

SEQ ID NO: 600 - protein, 7 aa, synthetic construct
  REGION 1..7: note = source = /note="Description of Artificial Sequence: Synthetic peptide"
TSGMCVS

SEQ ID NO: 601 - protein, 5 aa, synthetic construct
  REGION 1..5: note = source = /note="Description of Artificial Sequence: Synthetic peptide"
SYSMN

SEQ ID NO: 602 - protein, 5 aa, synthetic construct
  REGION 1..5: note = source = /note="Description of Artificial Sequence: Synthetic peptide"
DYYMS

SEQ ID NO: 603 - protein, 5 aa, synthetic construct
  REGION 1..5: note = source = /note="Description of Artificial Sequence: Synthetic peptide"
SHYIH

SEQ ID NO: 604 - protein, 7 aa, synthetic construct
  REGION 1..7: note = source = /note="Description of Artificial Sequence: Synthetic peptide"
SGGYYWS

SEQ ID NO: 605 - protein, 5 aa, synthetic construct
  REGION 1..5: note = source = /note="Description of Artificial Sequence: Synthetic peptide"
SYAIS

SEQ ID NO: 606 - protein, 7 aa, synthetic construct
  REGION 1..7: note = source = /note="Description of Artificial Sequence: Synthetic peptide"
SNSAAWN

SEQ ID NO: 607 - protein, 5 aa, synthetic construct
  REGION 1..5: note = source = /note="Description of Artificial Sequence: Synthetic peptide"
SYAMS

SEQ ID NO: 608 - protein, 5 aa, synthetic construct
  REGION 1..5: note = source = /note="Description of Artificial Sequence: Synthetic peptide"
RYPMS

SEQ ID NO: 609 - protein, 5 aa, synthetic construct
  REGION 1..5: note = source = /note="Description of Artificial Sequence: Synthetic peptide"
SYAMS

SEQ ID NO: 610 - protein, 5 aa, synthetic construct
  REGION 1..5: note = source = /note="Description of Artificial Sequence: Synthetic peptide"
SYAMS

SEQ ID NO: 611 - protein, 5 aa, synthetic construct
  REGION 1..5: note = source = /note="Description of Artificial Sequence: Synthetic peptide"
DYAMH

SEQ ID NO: 612 - protein, 5 aa, synthetic construct
  REGION 1..5: note = source = /note="Description of Artificial Sequence: Synthetic peptide"
DYAMH

SEQ ID NO: 613 - protein, 5 aa, synthetic construct
  REGION 1..5: note = source = /note="Description of Artificial Sequence: Synthetic peptide"
SYAMS

SEQ ID NO: 614 - protein, 5 aa, synthetic construct
  REGION 1..5: note = source = /note="Description of Artificial Sequence: Synthetic peptide"
SYAMS

SEQ ID NO: 615 - protein, 5 aa, synthetic construct
  REGION 1..5: note = source = /note="Description of Artificial Sequence: Synthetic peptide"
SYAMS

SEQ ID NO: 616 - protein, 5 aa, synthetic construct
  REGION 1..5: note = source = /note="Description of Artificial Sequence: Synthetic peptide"
SYAMS

SEQ ID NO: 617 - protein, 5 aa, synthetic construct
  REGION 1..5: note = source = /note="Description of Artificial Sequence: Synthetic peptide"
SYAMS

SEQ ID NO: 618 - protein, 5 aa, synthetic construct
  REGION 1..5: note = source = /note="Description of Artificial Sequence: Synthetic peptide"
SYAMS

SEQ ID NO: 619 - protein, 5 aa, synthetic construct
  REGION 1..5: note = source = /note="Description of Artificial Sequence: Synthetic peptide"
SYAMS

SEQ ID NO: 620 - protein, 5 aa, synthetic construct
  REGION 1..5: note = source = /note="Description of Artificial Sequence: Synthetic peptide"
NFGMN

SEQ ID NO: 621 - protein, 5 aa, synthetic construct
  REGION 1..5: note = source = /note="Description of Artificial Sequence: Synthetic peptide"
DYSIN

SEQ ID NO: 622 - protein, 5 aa, synthetic construct
  REGION 1..5: note = source = /note="Description of Artificial Sequence: Synthetic peptide"
HYSMN

SEQ ID NO: 623 - protein, 5 aa, synthetic construct
  REGION 1..5: note = source = /note="Description of Artificial Sequence: Synthetic peptide"
HYSMN

SEQ ID NO: 624 - protein, 17 aa, synthetic construct
  REGION 1..17: note = source = /note="Description of Artificial Sequence: Synthetic peptide"
GISRSGENTYYADSVKG

SEQ ID NO: 625 - protein, 17 aa, synthetic construct
  REGION 1..17: note = source = /note="Description of Artificial Sequence: Synthetic peptide"
GISWNSGSIGYADSVKG

SEQ ID NO: 626 - protein, 16 aa, synthetic construct
  REGION 1..16: note = source = /note="Description of Artificial Sequence: Synthetic peptide"
GIVYSGSTYYAASVKG

SEQ ID NO: 627 - protein, 17 aa, synthetic construct
  REGION 1..17: note = source = /note="Description of Artificial Sequence: Synthetic peptide"
WINPKNNNTNYAQKFQG

SEQ ID NO: 628 - protein, 17 aa, synthetic construct
  REGION 1..17: note = source = /note="Description of Artificial Sequence: Synthetic peptide"
VISGSGGTTYYADSVKG

SEQ ID NO: 629 - protein, 17 aa, synthetic construct
  REGION 1..17: note = source = /note="Description of Artificial Sequence: Synthetic peptide"
WISAYNGNTNYAQKFQG

SEQ ID NO: 630 - protein, 16 aa, synthetic construct
  REGION 1..16: note = source = /note="Description of Artificial Sequence: Synthetic peptide"
GIVYSGSTYYAASVKG

SEQ ID NO: 631 - protein, 16 aa, synthetic construct
  REGION 1..16: note = source = /note="Description of Artificial Sequence: Synthetic peptide"
GIVYSGSTYYAASVKG

SEQ ID NO: 632 - protein, 16 aa, synthetic construct
  REGION 1..16: note = source = /note="Description of Artificial Sequence: Synthetic peptide"
GIVYSGSTYYAASVKG

SEQ ID NO: 633 - protein, 17 aa, synthetic construct
  REGION 1..17: note = source = /note="Description of Artificial Sequence: Synthetic peptide"
YISSSGSTIYYADSVKG

SEQ ID NO: 634 - protein, 16 aa, synthetic construct
  REGION 1..16: note = source = /note="Description of Artificial Sequence: Synthetic peptide"
GIVYSGSTYYAASVKG

SEQ ID NO: 635 - protein, 17 aa, synthetic construct
  REGION 1..17: note = source = /note="Description of Artificial Sequence: Synthetic peptide"
YISSSGNTIYYADSVKG

SEQ ID NO: 636 - protein, 16 aa, synthetic construct
  REGION 1..16: note = source = /note="Description of Artificial Sequence: Synthetic peptide"
GIVYSGSTYYAASVKG

SEQ ID NO: 637 - protein, 16 aa, synthetic construct
  REGION 1..16: note = source = /note="Description of Artificial Sequence: Synthetic peptide"
GIVYSGSTYYAASVKG

SEQ ID NO: 638 - protein, 16 aa, synthetic construct
  REGION 1..16: note = source = /note="Description of Artificial Sequence: Synthetic peptide"
GIVYSGSTYYAASVKG

SEQ ID NO: 639 - protein, 16 aa, synthetic construct
  REGION 1..16: note = source = /note="Description of Artificial Sequence: Synthetic peptide"
SIYYSGSAYYNPSLKS

SEQ ID NO: 640 - protein, 16 aa, synthetic construct
  REGION 1..16: note = source = /note="Description of Artificial Sequence: Synthetic peptide"
RIDWDEDKFYSTSLKT

SEQ ID NO: 641 - protein, 17 aa, synthetic construct
  REGION 1..17: note = source = /note="Description of Artificial Sequence: Synthetic peptide"
SISSSSSYIYYADSVKG

SEQ ID NO: 642 - protein, 17 aa, synthetic construct
  REGION 1..17: note = source = /note="Description of Artificial Sequence: Synthetic peptide"
YISSSGSTIYYADSVKG

SEQ ID NO: 643 - protein, 17 aa, synthetic construct
  REGION 1..17: note = source = /note="Description of Artificial Sequence: Synthetic peptide"
MINPSGGVTAYSQTLQG

SEQ ID NO: 644 - protein, 16 aa, synthetic construct
  REGION 1..16: note = source = /note="Description of Artificial Sequence: Synthetic peptide"
YIYYSGSTYYNPSLKS

SEQ ID NO: 645 - protein, 17 aa, synthetic construct
  REGION 1..17: note = source = /note="Description of Artificial Sequence: Synthetic peptide"
GIIPIFGTANYAQKFQG

SEQ ID NO: 646 - protein, 18 aa, synthetic construct
  REGION 1..18: note = source = /note="Description of Artificial Sequence: Synthetic peptide"
RTYYRSKWYSFYAISLKS

SEQ ID NO: 647 - protein, 17 aa, synthetic construct
  REGION 1..17: note = source = /note="Description of Artificial Sequence: Synthetic peptide"
AISGSGGSTYYADSVKG

SEQ ID NO: 648 - protein, 17 aa, synthetic construct
  REGION 1..17: note = source = /note="Description of Artificial Sequence: Synthetic peptide"
GISDSGVSTYYADSAKG

SEQ ID NO: 649 - protein, 17 aa, synthetic construct
  REGION 1..17: note = source = /note="Description of Artificial Sequence: Synthetic peptide"
AISGSGGSTYYADSVKG

SEQ ID NO: 650 - protein, 17 aa, synthetic construct
  REGION 1..17: note = source = /note="Description of Artificial Sequence: Synthetic peptide"
AISGSGGSTYYADSVKG

SEQ ID NO: 651 - protein, 17 aa, synthetic construct
  REGION 1..17: note = source = /note="Description of Artificial Sequence: Synthetic peptide"
GISWNSGSIGYADSVKG

SEQ ID NO: 652 - protein, 17 aa, synthetic construct
  REGION 1..17: note = source = /note="Description of Artificial Sequence: Synthetic peptide"
SINWKGNSLAYGDSVKG

SEQ ID NO: 653 - protein, 17 aa, synthetic construct
  REGION 1..17: note = source = /note="Description of Artificial Sequence: Synthetic peptide"
AISGSGGSTYYADSVKG

SEQ ID NO: 654 - protein, 17 aa, synthetic construct
  REGION 1..17: note = source = /note="Description of Artificial Sequence: Synthetic peptide"
AISGSGGSTYYADSVKG

SEQ ID NO: 655 - protein, 17 aa, synthetic construct
  REGION 1..17: note = source = /note="Description of Artificial Sequence: Synthetic peptide"
AISGSGGSTYYADSVKG

SEQ ID NO: 656 - protein, 17 aa, synthetic construct
  REGION 1..17: note = source = /note="Description of Artificial Sequence: Synthetic peptide"
AISGSGGSTYYADSVKG

SEQ ID NO: 657 - protein, 17 aa, synthetic construct
  REGION 1..17: note = source = /note="Description of Artificial Sequence: Synthetic peptide"
AISGSGGSTYYADSVKG

SEQ ID NO: 658 - protein, 17 aa, synthetic construct
  REGION 1..17: note = source = /note="Description of Artificial Sequence: Synthetic peptide"
AISGSGGSTYYADSVKG

SEQ ID NO: 659 - protein, 17 aa, synthetic construct
  REGION 1..17: note = source = /note="Description of Artificial Sequence: Synthetic peptide"
AISGSGGSTYYADSVKG

SEQ ID NO: 660 - protein, 17 aa, synthetic construct
  REGION 1..17: note = source = /note="Description of Artificial Sequence: Synthetic peptide"
WINTYTGESYFADDFKG

SEQ ID NO: 661 - protein, 17 aa, synthetic construct
  REGION 1..17: note = source = /note="Description of Artificial Sequence: Synthetic peptide"
WINTETREPAYAYDFRG

SEQ ID NO: 662 - protein, 17 aa, synthetic construct
  REGION 1..17: note = source = /note="Description of Artificial Sequence: Synthetic peptide"
RINTESGVPIYADDFKG

SEQ ID NO: 663 - protein, 17 aa, synthetic construct
  REGION 1..17: note = source = /note="Description of Artificial Sequence: Synthetic peptide"
RINTETGEPLYADDFKG

SEQ ID NO: 664 - protein, 11 aa, synthetic construct
  REGION 1..11: note = source = /note="Description of Artificial Sequence: Synthetic peptide"
SPAHYYGGMDV

SEQ ID NO: 665 - protein, 6 aa, synthetic construct
  REGION 1..6: note = source = /note="Description of Artificial Sequence: Synthetic peptide"
HSFLAY

SEQ ID NO: 666 - protein, 7 aa, synthetic construct
  REGION 1..7: note = source = /note="Description of Artificial Sequence: Synthetic peptide"
HGGESDV

SEQ ID NO: 667 - protein, 11 aa, synthetic construct
  REGION 1..11: note = source = /note="Description of Artificial Sequence: Synthetic peptide"
GPYYYQSYMDV

SEQ ID NO: 668 - protein, 14 aa, synthetic construct
  REGION 1..14: note = source = /note="Description of Artificial Sequence: Synthetic peptide"
LDSSGYYYARGPRY

SEQ ID NO: 669 - protein, 9 aa, synthetic construct
  REGION 1..9: note = source = /note="Description of Artificial Sequence: Synthetic peptide"
GPYYYYMDV

SEQ ID NO: 670 - protein, 7 aa, synthetic construct
  REGION 1..7: note = source = /note="Description of Artificial Sequence: Synthetic peptide"
HGGESDV

SEQ ID NO: 671 - protein, 7 aa, synthetic construct
  REGION 1..7: note = source = /note="Description of Artificial Sequence: Synthetic peptide"
HGGESDV

SEQ ID NO: 672 - protein, 7 aa, synthetic construct
  REGION 1..7: note = source = /note="Description of Artificial Sequence: Synthetic peptide"
HGGESDV

SEQ ID NO: 673 - protein, 8 aa, synthetic construct
  REGION 1..8: note = source = /note="Description of Artificial Sequence: Synthetic peptide"
ESGDGMDV

SEQ ID NO: 674 - protein, 7 aa, synthetic construct
  REGION 1..7: note = source = /note="Description of Artificial Sequence: Synthetic peptide"
HGGESDV

SEQ ID NO: 675 - protein, 8 aa, synthetic construct
  REGION 1..8: note = source = /note="Description of Artificial Sequence: Synthetic peptide"
STMVREDY

SEQ ID NO: 676 - protein, 7 aa, synthetic construct
  REGION 1..7: note = source = /note="Description of Artificial Sequence: Synthetic peptide"
HGGESDV

SEQ ID NO: 677 - protein, 7 aa, synthetic construct
  REGION 1..7: note = source = /note="Description of Artificial Sequence: Synthetic peptide"
HGGESDV

SEQ ID NO: 678 - protein, 7 aa, synthetic construct
  REGION 1..7: note = source = /note="Description of Artificial Sequence: Synthetic peptide"
HGGESDV

SEQ ID NO: 679 - protein, 11 aa, synthetic construct
  REGION 1..11: note = source = /note="Description of Artificial Sequence: Synthetic peptide"
HWQEWPDAFDI

SEQ ID NO: 680 - protein, 13 aa, synthetic construct
  REGION 1..13: note = source = /note="Description of Artificial Sequence: Synthetic peptide"
SGAGGTSATAFDI

SEQ ID NO: 681 - protein, 10 aa, synthetic construct
  REGION 1..10: note = source = /note="Description of Artificial Sequence: Synthetic peptide"
TIAAVYAFDI

SEQ ID NO: 682 - protein, 8 aa, synthetic construct
  REGION 1..8: note = source = /note="Description of Artificial Sequence: Synthetic peptide"
DLRGAFDI

SEQ ID NO: 683 - protein, 11 aa, synthetic construct
  REGION 1..11: note = source = /note="Description of Artificial Sequence: Synthetic peptide"
EGSGSGWYFDF

SEQ ID NO: 684 - protein, 13 aa, synthetic construct
  REGION 1..13: note = source = /note="Description of Artificial Sequence: Synthetic peptide"
AGIAARLRGAFDI

SEQ ID NO: 685 - protein, 20 aa, synthetic construct
  REGION 1..20: note = source = /note="Description of Artificial Sequence: Synthetic peptide"
RGGYQLLRWDVGLLRSAFDI

SEQ ID NO: 686 - protein, 13 aa, synthetic construct
  REGION 1..13: note = source = /note="Description of Artificial Sequence: Synthetic peptide"
SSPEGLFLYWFDP

SEQ ID NO: 687 - protein, 9 aa, synthetic construct
  REGION 1..9: note = source = /note="Description of Artificial Sequence: Synthetic peptide"
VEGSGSLDY

SEQ ID NO: 688 - protein, 9 aa, synthetic construct
  REGION 1..9: note = source = /note="Description of Artificial Sequence: Synthetic peptide"
RAGSEASDI

SEQ ID NO: 689 - protein, 15 aa, synthetic construct
  REGION 1..15: note = source = /note="Description of Artificial Sequence: Synthetic peptide"
ATYKRELRYYYGMDV

SEQ ID NO: 690 - protein, 15 aa, synthetic construct
  REGION 1..15: note = source = /note="Description of Artificial Sequence: Synthetic peptide"
ATYKRELRYYYGMDV

SEQ ID NO: 691 - protein, 8 aa, synthetic construct
  REGION 1..8: note = source = /note="Description of Artificial Sequence: Synthetic peptide"
VGKAVPDV

SEQ ID NO: 692 - protein, 13 aa, synthetic construct
  REGION 1..13: note = source = /note="Description of Artificial Sequence: Synthetic peptide"
HQGVAYYNYAMDV

SEQ ID NO: 693 - protein, 8 aa, synthetic construct
  REGION 1..8: note = source = /note="Description of Artificial Sequence: Synthetic peptide"
VVRDGMDV

SEQ ID NO: 694 - protein, 9 aa, synthetic construct
  REGION 1..9: note = source = /note="Description of Artificial Sequence: Synthetic peptide"
IPQTGTFDY

SEQ ID NO: 695 - protein, 15 aa, synthetic construct
  REGION 1..15: note = source = /note="Description of Artificial Sequence: Synthetic peptide"
ANYKRELRYYYGMDV

SEQ ID NO: 696 - protein, 11 aa, synthetic construct
  REGION 1..11: note = source = /note="Description of Artificial Sequence: Synthetic peptide"
ALVGATGAFDI

SEQ ID NO: 697 - protein, 8 aa, synthetic construct
  REGION 1..8: note = source = /note="Description of Artificial Sequence: Synthetic peptide"
WFGEGFDP

SEQ ID NO: 698 - protein, 17 aa, synthetic construct
  REGION 1..17: note = source = /note="Description of Artificial Sequence: Synthetic peptide"
VGYDSSGYYRDYYGMDV

SEQ ID NO: 699 - protein, 13 aa, synthetic construct
  REGION 1..13: note = source = /note="Description of Artificial Sequence: Synthetic peptide"
MGWSSGYLGAFDI

SEQ ID NO: 700 - protein, 13 aa, synthetic construct
  REGION 1..13: note = source = /note="Description of Artificial Sequence: Synthetic peptide"
GEIYYGYDGGFAY

SEQ ID NO: 701 - protein, 8 aa, synthetic construct
  REGION 1..8: note = source = /note="Description of Artificial Sequence: Synthetic peptide"
DYSYAMDY

SEQ ID NO: 702 - protein, 8 aa, synthetic construct
  REGION 1..8: note = source = /note="Description of Artificial Sequence: Synthetic peptide"
DYLYSLDF

SEQ ID NO: 703 - protein, 8 aa, synthetic construct
  REGION 1..8: note = source = /note="Description of Artificial Sequence: Synthetic peptide"
DYLYSCDY

SEQ ID NO: 704 - protein, 12 aa, synthetic construct
  REGION 1..12: note = source = /note="Description of Artificial Sequence: Synthetic peptide"
RASQSISSSFLA

SEQ ID NO: 705 - protein, 16 aa, synthetic construct
  REGION 1..16: note = source = /note="Description of Artificial Sequence: Synthetic peptide"
RSSQSLLHSNGYNYLD

SEQ ID NO: 706 - protein, 16 aa, synthetic construct
  REGION 1..16: note = source = /note="Description of Artificial Sequence: Synthetic peptide"
KSSQSLLRNDGKTPLY

SEQ ID NO: 707 - protein, 16 aa, synthetic construct
  REGION 1..16: note = source = /note="Description of Artificial Sequence: Synthetic peptide"
RSSQSLLHSNGYNYLN

SEQ ID NO: 708 - protein, 11 aa, synthetic construct
  REGION 1..11: note = source = /note="Description of Artificial Sequence: Synthetic peptide"
RASQSISSYLN

SEQ ID NO: 709 - protein, 16 aa, synthetic construct
  REGION 1..16: note = source = /note="Description of Artificial Sequence: Synthetic peptide"
RSSQSLLYSNGYNYVD

SEQ ID NO: 710 - protein, 11 aa, synthetic construct
  REGION 1..11: note = source = /note="Description of Artificial Sequence: Synthetic peptide"
RASQSVSSNLA

SEQ ID NO: 711 - protein, 11 aa, synthetic construct
  REGION 1..11: note = source = /note="Description of Artificial Sequence: Synthetic peptide"
RASQSVSSKLA

SEQ ID NO: 712 - protein, 12 aa, synthetic construct
  REGION 1..12: note = source = /note="Description of Artificial Sequence: Synthetic peptide"
RASQSVGSTNLA

SEQ ID NO: 713 - protein, 11 aa, synthetic construct
  REGION 1..11: note = source = /note="Description of Artificial Sequence: Synthetic peptide"
RASQSISSYLN

SEQ ID NO: 714 - protein, 11 aa, synthetic construct
  REGION 1..11: note = source = /note="Description of Artificial Sequence: Synthetic peptide"
RASQSISSYLN

SEQ ID NO: 715 - protein, 16 aa, synthetic construct
  REGION 1..16: note = source = /note="Description of Artificial Sequence: Synthetic peptide"
KSSESLVHNSGKTYLN

SEQ ID NO: 716 - protein, 11 aa, synthetic construct
  REGION 1..11: note = source = /note="Description of Artificial Sequence: Synthetic peptide"
QASEDINKFLN

SEQ ID NO: 717 - protein, 11 aa, synthetic construct
  REGION 1..11: note = source = /note="Description of Artificial Sequence: Synthetic peptide"
RASQSVGSNLA

SEQ ID NO: 718 - protein, 12 aa, synthetic construct
  REGION 1..12: note = source = /note="Description of Artificial Sequence: Synthetic peptide"
RASQSIGSSSLA

SEQ ID NO: 719 - protein, 11 aa, synthetic construct
  REGION 1..11: note = source = /note="Description of Artificial Sequence: Synthetic peptide"
KASQDIDDAMN

SEQ ID NO: 720 - protein, 11 aa, synthetic construct
  REGION 1..11: note = source = /note="Description of Artificial Sequence: Synthetic peptide"
RASQDIYNNLA

SEQ ID NO: 721 - protein, 16 aa, synthetic construct
  REGION 1..16: note = source = /note="Description of Artificial Sequence: Synthetic peptide"
RSSQSLLHSNGYNYLD

SEQ ID NO: 722 - protein, 11 aa, synthetic construct
  REGION 1..11: note = source = /note="Description of Artificial Sequence: Synthetic peptide"
GGNNIGTKSVH

SEQ ID NO: 723 - protein, 11 aa, synthetic construct
  REGION 1..11: note = source = /note="Description of Artificial Sequence: Synthetic peptide"
SGDGLSKKYVS

SEQ ID NO: 724 - protein, 11 aa, synthetic construct
  REGION 1..11: note = source = /note="Description of Artificial Sequence: Synthetic peptide"
RASQGIRNWLA

SEQ ID NO: 725 - protein, 11 aa, synthetic construct
  REGION 1..11: note = source = /note="Description of Artificial Sequence: Synthetic peptide"
GGNNIGSKSVH

SEQ ID NO: 726 - protein, 11 aa, synthetic construct
  REGION 1..11: note = source = /note="Description of Artificial Sequence: Synthetic peptide"
QGDSLGNYYAT

SEQ ID NO: 727 - protein, 12 aa, synthetic construct
  REGION 1..12: note = source = /note="Description of Artificial Sequence: Synthetic peptide"
RASQSVSSAYLA

SEQ ID NO: 728 - protein, 11 aa, synthetic construct
  REGION 1..11: note = source = /note="Description of Artificial Sequence: Synthetic peptide"
RASQSVSNSLA

SEQ ID NO: 729 - protein, 12 aa, synthetic construct
  REGION 1..12: note = source = /note="Description of Artificial Sequence: Synthetic peptide"
RASQSVSSSFLA

SEQ ID NO: 730 - protein, 12 aa, synthetic construct
  REGION 1..12: note = source = /note="Description of Artificial Sequence: Synthetic peptide"
RASQSVSTTFLA

SEQ ID NO: 731 - protein, 11 aa, synthetic construct
  REGION 1..11: note = source = /note="Description of Artificial Sequence: Synthetic peptide"
RASQSISSYLN

SEQ ID NO: 732 - protein, 12 aa, synthetic construct
  REGION 1..12: note = source = /note="Description of Artificial Sequence: Synthetic peptide"
RATQSIGSSFLA

SEQ ID NO: 733 - protein, 12 aa, synthetic construct
  REGION 1..12: note = source = /note="Description of Artificial Sequence: Synthetic peptide"
RASQSVSSSYLA

SEQ ID NO: 734 - protein, 12 aa, synthetic construct
  REGION 1..12: note = source = /note="Description of Artificial Sequence: Synthetic peptide"
RASQSVSSSYLA

SEQ ID NO: 735 - protein, 12 aa, synthetic construct
  REGION 1..12: note = source = /note="Description of Artificial Sequence: Synthetic peptide"
RASQRVASNYLA

SEQ ID NO: 736 - protein, 12 aa, synthetic construct
  REGION 1..12: note = source = /note="Description of Artificial Sequence: Synthetic peptide"
RASQSLSSNFLA

SEQ ID NO: 737 - protein, 16 aa, synthetic construct
  REGION 1..16: note = source = /note="Description of Artificial Sequence: Synthetic peptide"
RSSQSLLHSNGYNYLD

SEQ ID NO: 738 - protein, 12 aa, synthetic construct
  REGION 1..12: note = source = /note="Description of Artificial Sequence: Synthetic peptide"
RASQSVSSSYLA

SEQ ID NO: 739 - protein, 12 aa, synthetic construct
  REGION 1..12: note = source = /note="Description of Artificial Sequence: Synthetic peptide"
RASQSVASSFLA

SEQ ID NO: 740 - protein, 11 aa, synthetic construct
  REGION 1..11: note = source = /note="Description of Artificial Sequence: Synthetic peptide"
RASQDVNTAVS

SEQ ID NO: 741 - protein, 15 aa, synthetic construct
  REGION 1..15: note = source = /note="Description of Artificial Sequence: Synthetic peptide"
RASESVSVIGAHLIH

SEQ ID NO: 742 - protein, 15 aa, synthetic construct
  REGION 1..15: note = source = /note="Description of Artificial Sequence: Synthetic peptide"
RASESVTILGSHLIY

SEQ ID NO: 743 - protein, 15 aa, synthetic construct
  REGION 1..15: note = source = /note="Description of Artificial Sequence: Synthetic peptide"
RASESVTILGSHLIY

SEQ ID NO: 744 - protein, 7 aa, synthetic construct
  REGION 1..7: note = source = /note="Description of Artificial Sequence: Synthetic peptide"
GASRRAT

SEQ ID NO: 745 - protein, 7 aa, synthetic construct
  REGION 1..7: note = source = /note="Description of Artificial Sequence: Synthetic peptide"
LGSNRAS

SEQ ID NO: 746 - protein, 7 aa, synthetic construct
  REGION 1..7: note = source = /note="Description of Artificial Sequence: Synthetic peptide"
EVSNRFS

SEQ ID NO: 747 - protein, 7 aa, synthetic construct
  REGION 1..7: note = source = /note="Description of Artificial Sequence: Synthetic peptide"
LGSKRAS

SEQ ID NO: 748 - protein, 7 aa, synthetic construct
  REGION 1..7: note = source = /note="Description of Artificial Sequence: Synthetic peptide"
GASTLAS

SEQ ID NO: 749 - protein, 7 aa, synthetic construct
  REGION 1..7: note = source = /note="Description of Artificial Sequence: Synthetic peptide"
LGSNRAS

SEQ ID NO: 750 - protein, 7 aa, synthetic construct
  REGION 1..7: note = source = /note="Description of Artificial Sequence: Synthetic peptide"
GASTRAS

SEQ ID NO: 751 - protein, 7 aa, synthetic construct
  REGION 1..7: note = source = /note="Description of Artificial Sequence: Synthetic peptide"
GASIRAT

SEQ ID NO: 752 - protein, 7 aa, synthetic construct
  REGION 1..7: note = source = /note="Description of Artificial Sequence: Synthetic peptide"
DASNRAT

SEQ ID NO: 753 - protein, 7 aa, synthetic construct
  REGION 1..7: note = source = /note="Description of Artificial Sequence: Synthetic peptide"
AASSLQS

SEQ ID NO: 754 - protein, 7 aa, synthetic construct
  REGION 1..7: note = source = /note="Description of Artificial Sequence: Synthetic peptide"
AASSLQS

SEQ ID NO: 755 - protein, 7 aa, synthetic construct
  REGION 1..7: note = source = /note="Description of Artificial Sequence: Synthetic peptide"
EVSNRDS

SEQ ID NO: 756 - protein, 7 aa, synthetic construct
  REGION 1..7: note = source = /note="Description of Artificial Sequence: Synthetic peptide"
DASTLQT

SEQ ID NO: 757 - protein, 7 aa, synthetic construct
  REGION 1..7: note = source = /note="Description of Artificial Sequence: Synthetic peptide"
GASTRAT

SEQ ID NO: 758 - protein, 7 aa, synthetic construct
  REGION 1..7: note = source = /note="Description of Artificial Sequence: Synthetic peptide"
GASSRAS

SEQ ID NO: 759 - protein, 7 aa, synthetic construct
  REGION 1..7: note = source = /note="Description of Artificial Sequence: Synthetic peptide"
SATSPVP

SEQ ID NO: 760 - protein, 7 aa, synthetic construct
  REGION 1..7: note = source = /note="Description of Artificial Sequence: Synthetic peptide"
AANKSQS

SEQ ID NO: 761 - protein, 7 aa, synthetic construct
  REGION 1..7: note = source = /note="Description of Artificial Sequence: Synthetic peptide"
LGSNRAS

SEQ ID NO: 762 - protein, 7 aa, synthetic construct
  REGION 1..7: note = source = /note="Description of Artificial Sequence: Synthetic peptide"
DDSVRPS

SEQ ID NO: 763 - protein, 7 aa, synthetic construct
  REGION 1..7: note = source = /note="Description of Artificial Sequence: Synthetic peptide"
RDKERPS

SEQ ID NO: 764 - protein, 7 aa, synthetic construct
  REGION 1..7: note = source = /note="Description of Artificial Sequence: Synthetic peptide"
AASNLQS

SEQ ID NO: 765 - protein, 7 aa, synthetic construct
  REGION 1..7: note = source = /note="Description of Artificial Sequence: Synthetic peptide"
GKNNRPS

SEQ ID NO: 766 - protein, 7 aa, synthetic construct
  REGION 1..7: note = source = /note="Description of Artificial Sequence: Synthetic peptide"
GTNNRPS

SEQ ID NO: 767 - protein, 7 aa, synthetic construct
  REGION 1..7: note = source = /note="Description of Artificial Sequence: Synthetic peptide"
GASTRAT

SEQ ID NO: 768 - protein, 7 aa, synthetic construct
  REGION 1..7: note = source = /note="Description of Artificial Sequence: Synthetic peptide"
DASSRAT

SEQ ID NO: 769 - protein, 7 aa, synthetic construct
  REGION 1..7: note = source = /note="Description of Artificial Sequence: Synthetic peptide"
GASSRAT

SEQ ID NO: 770 - protein, 7 aa, synthetic construct
  REGION 1..7: note = source = /note="Description of Artificial Sequence: Synthetic peptide"
GSSNRAT

SEQ ID NO: 771 - protein, 7 aa, synthetic construct
  REGION 1..7: note = source = /note="Description of Artificial Sequence: Synthetic peptide"
AASSLQS

SEQ ID NO: 772 - protein, 7 aa, synthetic construct
  REGION 1..7: note = source = /note="Description of Artificial Sequence: Synthetic peptide"
GASQRAT

SEQ ID NO: 773 - protein, 7 aa, synthetic construct
  REGION 1..7: note = source = /note="Description of Artificial Sequence: Synthetic peptide"
GASSRAT

SEQ ID NO: 774 - protein, 7 aa, synthetic construct
  REGION 1..7: note = source = /note="Description of Artificial Sequence: Synthetic peptide"
GASSRAT

SEQ ID NO: 775 - protein, 7 aa, synthetic construct
  REGION 1..7: note = source = /note="Description of Artificial Sequence: Synthetic peptide"
GASSRAT

SEQ ID NO: 776 - protein, 7 aa, synthetic construct
  REGION 1..7: note = source = /note="Description of Artificial Sequence: Synthetic peptide"
GASNWAT

SEQ ID NO: 777 - protein, 7 aa, synthetic construct
  REGION 1..7: note = source = /note="Description of Artificial Sequence: Synthetic peptide"
LGSNRAS

SEQ ID NO: 778 - protein, 7 aa, synthetic construct
  REGION 1..7: note = source = /note="Description of Artificial Sequence: Synthetic peptide"
GTSSRAT

SEQ ID NO: 779 - protein, 7 aa, synthetic construct
  REGION 1..7: note = source = /note="Description of Artificial Sequence: Synthetic peptide"
GASGRAT

SEQ ID NO: 780 - protein, 7 aa, synthetic construct
  REGION 1..7: note = source = /note="Description of Artificial Sequence: Synthetic peptide"
SASYRYT

SEQ ID NO: 781 - protein, 7 aa, synthetic construct
  REGION 1..7: note = source = /note="Description of Artificial Sequence: Synthetic peptide"
LASNLET

SEQ ID NO: 782 - protein, 7 aa, synthetic construct
  REGION 1..7: note = source = /note="Description of Artificial Sequence: Synthetic peptide"
LASNVQT

SEQ ID NO: 783 - protein, 7 aa, synthetic construct
  REGION 1..7: note = source = /note="Description of Artificial Sequence: Synthetic peptide"
LASNVQT

SEQ ID NO: 784 - protein, 10 aa, synthetic construct
  REGION 1..10: note = source = /note="Description of Artificial Sequence: Synthetic peptide"
QQYHSSPSWT

SEQ ID NO: 785 - protein, 9 aa, synthetic construct
  REGION 1..9: note = source = /note="Description of Artificial Sequence: Synthetic peptide"
MQALQTPYT

SEQ ID NO: 786 - protein, 8 aa, synthetic construct
  REGION 1..8: note = source = /note="Description of Artificial Sequence: Synthetic peptide"
MQNIQFPS

SEQ ID NO: 787 - protein, 9 aa, synthetic construct
  REGION 1..9: note = source = /note="Description of Artificial Sequence: Synthetic peptide"
MQALQTPYT

SEQ ID NO: 788 - protein, 8 aa, synthetic construct
  REGION 1..8: note = source = /note="Description of Artificial Sequence: Synthetic peptide"
QQSYKRAS

SEQ ID NO: 789 - protein, 9 aa, synthetic construct
  REGION 1..9: note = source = /note="Description of Artificial Sequence: Synthetic peptide"
MQGRQFPYS

SEQ ID NO: 790 - protein, 8 aa, synthetic construct
  REGION 1..8: note = source = /note="Description of Artificial Sequence: Synthetic peptide"
QQYGSSLT

SEQ ID NO: 791 - protein, 9 aa, synthetic construct
  REGION 1..9: note = source = /note="Description of Artificial Sequence: Synthetic peptide"
QQYGSSSWT

SEQ ID NO: 792 - protein, 10 aa, synthetic construct
  REGION 1..10: note = source = /note="Description of Artificial Sequence: Synthetic peptide"
QQYGSSPPWT

SEQ ID NO: 793 - protein, 7 aa, synthetic construct
  REGION 1..7: note = source = /note="Description of Artificial Sequence: Synthetic peptide"
QQSYTLA

SEQ ID NO: 794 - protein, 9 aa, synthetic construct
  REGION 1..9: note = source = /note="Description of Artificial Sequence: Synthetic peptide"
QQSYSTPYT

SEQ ID NO: 795 - protein, 9 aa, synthetic construct
  REGION 1..9: note = source = /note="Description of Artificial Sequence: Synthetic peptide"
MQGTHWPGT

SEQ ID NO: 796 - protein, 9 aa, synthetic construct
  REGION 1..9: note = source = /note="Description of Artificial Sequence: Synthetic peptide"
QQYESLPLT

SEQ ID NO: 797 - protein, 10 aa, synthetic construct
  REGION 1..10: note = source = /note="Description of Artificial Sequence: Synthetic peptide"
QQYNDWLPVT

SEQ ID NO: 798 - protein, 10 aa, synthetic construct
  REGION 1..10: note = source = /note="Description of Artificial Sequence: Synthetic peptide"
QQYAGSPPFT

SEQ ID NO: 799 - protein, 9 aa, synthetic construct
  REGION 1..9: note = source = /note="Description of Artificial Sequence: Synthetic peptide"
LQHDNFPLT

SEQ ID NO: 800 - protein, 9 aa, synthetic construct
  REGION 1..9: note = source = /note="Description of Artificial Sequence: Synthetic peptide"
QHYYRFPYS

SEQ ID NO: 801 - protein, 9 aa, synthetic construct
  REGION 1..9: note = source = /note="Description of Artificial Sequence: Synthetic peptide"
MQALQTPYT

SEQ ID NO: 802 - protein, 11 aa, synthetic construct
  REGION 1..11: note = source = /note="Description of Artificial Sequence: Synthetic peptide"
QVWDSDSEHVV

SEQ ID NO: 803 - protein, 9 aa, synthetic construct
  REGION 1..9: note = source = /note="Description of Artificial Sequence: Synthetic peptide"
QAWDDTTVV

SEQ ID NO: 804 - protein, 9 aa, synthetic construct
  REGION 1..9: note = source = /note="Description of Artificial Sequence: Synthetic peptide"
QKYNSAPFT

SEQ ID NO: 805 - protein, 12 aa, synthetic construct
  REGION 1..12: note = source = /note="Description of Artificial Sequence: Synthetic peptide"
SSRDSSGDHLRV

SEQ ID NO: 806 - protein, 11 aa, synthetic construct
  REGION 1..11: note = source = /note="Description of Artificial Sequence: Synthetic peptide"
NSRDSSGHHLL

SEQ ID NO: 807 - protein, 14 aa, synthetic construct
  REGION 1..14: note = source = /note="Description of Artificial Sequence: Synthetic peptide"
QHYGSSFNGSSLFT

SEQ ID NO: 808 - protein, 10 aa, synthetic construct
  REGION 1..10: note = source = /note="Description of Artificial Sequence: Synthetic peptide"
QQFGTSSGLT

SEQ ID NO: 809 - protein, 10 aa, synthetic construct
  REGION 1..10: note = source = /note="Description of Artificial Sequence: Synthetic peptide"
QQYHSSPSWT

SEQ ID NO: 810 - protein, 10 aa, synthetic construct
  REGION 1..10: note = source = /note="Description of Artificial Sequence: Synthetic peptide"
QQYHSSPSWT

SEQ ID NO: 811 - protein, 9 aa, synthetic construct
  REGION 1..9: note = source = /note="Description of Artificial Sequence: Synthetic peptide"
QQSYSTPYS

SEQ ID NO: 812 - protein, 10 aa, synthetic construct
  REGION 1..10: note = source = /note="Description of Artificial Sequence: Synthetic peptide"
QHYESSPSWT

SEQ ID NO: 813 - protein, 10 aa, synthetic construct
  REGION 1..10: note = source = /note="Description of Artificial Sequence: Synthetic peptide"
QQYGSPPRFT

SEQ ID NO: 814 - protein, 10 aa, synthetic construct
  REGION 1..10: note = source = /note="Description of Artificial Sequence: Synthetic peptide"
QHYGSSPSWT

SEQ ID NO: 815 - protein, 10 aa, synthetic construct
  REGION 1..10: note = source = /note="Description of Artificial Sequence: Synthetic peptide"
QHYDSSPSWT

SEQ ID NO: 816 - protein, 10 aa, synthetic construct
  REGION 1..10: note = source = /note="Description of Artificial Sequence: Synthetic peptide"
QYYGTSPMYT

SEQ ID NO: 817 - protein, 9 aa, synthetic construct
  REGION 1..9: note = source = /note="Description of Artificial Sequence: Synthetic peptide"
MQALQTPLT

SEQ ID NO: 818 - protein, 11 aa, synthetic construct
  REGION 1..11: note = source = /note="Description of Artificial Sequence: Synthetic peptide"
QHYGNSPPKFT

SEQ ID NO: 819 - protein, 10 aa, synthetic construct
  REGION 1..10: note = source = /note="Description of Artificial Sequence: Synthetic peptide"
QHYGGSPRLT

SEQ ID NO: 820 - protein, 9 aa, synthetic construct
  REGION 1..9: note = source = /note="Description of Artificial Sequence: Synthetic peptide"
QQHYSTPWT

SEQ ID NO: 821 - protein, 9 aa, synthetic construct
  REGION 1..9: note = source = /note="Description of Artificial Sequence: Synthetic peptide"
LQSRIFPRT

SEQ ID NO: 822 - protein, 9 aa, synthetic construct
  REGION 1..9: note = source = /note="Description of Artificial Sequence: Synthetic peptide"
LQSRTIPRT

SEQ ID NO: 823 - protein, 9 aa, synthetic construct
  REGION 1..9: note = source = /note="Description of Artificial Sequence: Synthetic peptide"
LQSRTIPRT

SEQ ID NO: 824-848 - skipped (25 entries)

SEQ ID NO: 849 - protein, 490 aa, synthetic construct
  REGION 1..490: note = source = /note="Description of Artificial Sequence: Synthetic polypeptide"
MALPVTALLLPLALLLHAARPQVQLVESGGGLVQPGRSLRLSCAASGFTFSNYAMSWVRQAPGKGLGWVSGISRSGENTYYADSVKGRFTISRDNSKNTLYLQMNSLRDEDTAVYYCARSPAHYYGGMDVWGQGTTVTVSSASGGGGSGGRASGGGGSDIVLTQSPGTLSLSPGERATLSCRASQSISSSFLAWYQQKPGQAPRLLIYGASRRATGIPDRFSGSGSGTDFTLTISRLEPEDSAVYYCQQYHSSPSWTFGQGTKLEIKTTTPAPRPPTPAPTIASQPLSLRPEACRPAAGGAVHTRGLDFACDIYIWAPLAGTCGVLLLSLVITLYCKRGRKKLLYIFKQPFMRPVQTTQEEDGCSCRFPEEEEGGCELRVKFSRSADAPAYKQGQNQLYNELNLGRREEYDVLDKRRGRDPEMGGKPRRKNPQEGLYNELQKDKMAEAYSEIGMKGERRRGKGHDGLYQGLSTATKDTYDALHMQALPPR

SEQ ID NO: 850 - protein, 488 aa, synthetic construct
  REGION 1..488: note = source = /note="Description of Artificial Sequence: Synthetic polypeptide"
MALPVTALLLPLALLLHAARPQVQLVESGGGLVQPGRSLRLSCAASGFTFDDYAMHWVRQAPGKGLEWVSGISWNSGSIGYADSVKGRFTISRDNAKNSLYLQMNSLRAEDTALYYCSVHSFLAYWGQGTLVTVSSASGGGGSGGRASGGGGSDIVMTQTPLSLPVTPGEPASISCRSSQSLLHSNGYNYLDWYLQKPGQSPQLLIYLGSNRASGVPDRFSGSGSGTDFTLKISRVEAEDVGVYYCMQALQTPYTFGQGTKVEIKTTTPAPRPPTPAPTIASQPLSLRPEACRPAAGGAVHTRGLDFACDIYIWAPLAGTCGVLLLSLVITLYCKRGRKKLLYIFKQPFMRPVQTTQEEDGCSCRFPEEEEGGCELRVKFSRSADAPAYKQGQNQLYNELNLGRREEYDVLDKRRGRDPEMGGKPRRKNPQEGLYNELQKDKMAEAYSEIGMKGERRRGKGHDGLYQGLSTATKDTYDALHMQALPPR

SEQ ID NO: 851 - protein, 487 aa, synthetic construct
  REGION 1..487: note = source = /note="Description of Artificial Sequence: Synthetic polypeptide"
MALPVTALLLPLALLLHAARPEVQLLESGGGLVQPGGSLRLSCAVSGFALSNHGMSWVRRAPGKGLEWVSGIVYSGSTYYAASVKGRFTISRDNSRNTLYLQMNSLRPEDTAIYYCSAHGGESDVWGQGTTVTVSSASGGGGSGGRASGGGGSDIVMTQTPLSLSVTPGQPASISCKSSQSLLRNDGKTPLYWYLQKAGQPPQLLIYEVSNRFSGVPDRFSGSGSGTDFTLKISRVEAEDVGAYYCMQNIQFPSFGGGTKLEIKTTTPAPRPPTPAPTIASQPLSLRPEACRPAAGGAVHTRGLDFACDIYIWAPLAGTCGVLLLSLVITLYCKRGRKKLLYIFKQPFMRPVQTTQEEDGCSCRFPEEEEGGCELRVKFSRSADAPAYKQGQNQLYNELNLGRREEYDVLDKRRGRDPEMGGKPRRKNPQEGLYNELQKDKMAEAYSEIGMKGERRRGKGHDGLYQGLSTATKDTYDALHMQALPPR

SEQ ID NO: 852 - protein, 493 aa, synthetic construct
  REGION 1..493: note = source = /note="Description of Artificial Sequence: Synthetic polypeptide"
MALPVTALLLPLALLLHAARPQVQLVQSGAEVRKTGASVKVSCKASGYIFDNFGINWVRQAPGQGLEWMGWINPKNNNTNYAQKFQGRVTITADESTNTAYMEVSSLRSEDTAVYYCARGPYYYQSYMDVWGQGTMVTVSSASGGGGSGGRASGGGGSDIVMTQTPLSLPVTPGEPASISCRSSQSLLHSNGYNYLNWYLQKPGQSPQLLIYLGSKRASGVPDRFSGSGSGTDFTLHITRVGAEDVGVYYCMQALQTPYTFGQGTKLEIKTTTPAPRPPTPAPTIASQPLSLRPEACRPAAGGAVHTRGLDFACDIYIWAPLAGTCGVLLLSLVITLYCKRGRKKLLYIFKQPFMRPVQTTQEEDGCSCRFPEEEEGGCELRVKFSRSADAPAYKQGQNQLYNELNLGRREEYDVLDKRRGRDPEMGGKPRRKNPQEGLYNELQKDKMAEAYSEIGMKGERRRGKGHDGLYQGLSTATKDTYDALHMQALPPR

SEQ ID NO: 853 - protein, 490 aa, synthetic construct
  REGION 1..490: note = source = /note="Description of Artificial Sequence: Synthetic polypeptide"
MALPVTALLLPLALLLHAARPQVQLQESGGGLVQPGGSLRLSCAASGFTFSSDAMTWVRQAPGKGLEWVSVISGSGGTTYYADSVKGRFTISRDNSKNTLYLQMNSLRAEDTAVYYCAKLDSSGYYYARGPRYWGQGTLVTVSSASGGGGSGGRASGGGGSDIQLTQSPSSLSASVGDRVTITCRASQSISSYLNWYQQKPGKAPKLLIYGASTLASGVPARFSGSGSGTHFTLTINSLQSEDSATYYCQQSYKRASFGQGTKVEIKTTTPAPRPPTPAPTIASQPLSLRPEACRPAAGGAVHTRGLDFACDIYIWAPLAGTCGVLLLSLVITLYCKRGRKKLLYIFKQPFMRPVQTTQEEDGCSCRFPEEEEGGCELRVKFSRSADAPAYKQGQNQLYNELNLGRREEYDVLDKRRGRDPEMGGKPRRKNPQEGLYNELQKDKMAEAYSEIGMKGERRRGKGHDGLYQGLSTATKDTYDALHMQALPPR

SEQ ID NO: 854 - protein, 491 aa, synthetic construct
  REGION 1..491: note = source = /note="Description of Artificial Sequence: Synthetic polypeptide"
MALPVTALLLPLALLLHAARPQVQLVQSGAEVKKPGASVKVSCKASGYTFSNYGITWVRQAPGQGLEWMGWISAYNGNTNYAQKFQGRVTMTRNTSISTAYMELSSLRSEDTAVYYCARGPYYYYMDVWGKGTMVTVSSASGGGGSGGRASGGGGSEIVMTQSPLSLPVTPGEPASISCRSSQSLLYSNGYNYVDWYLQKPGQSPQLLIYLGSNRASGVPDRFSGSGSGTDFKLQISRVEAEDVGIYYCMQGRQFPYSFGQGTKVEIKTTTPAPRPPTPAPTIASQPLSLRPEACRPAAGGAVHTRGLDFACDIYIWAPLAGTCGVLLLSLVITLYCKRGRKKLLYIFKQPFMRPVQTTQEEDGCSCRFPEEEEGGCELRVKFSRSADAPAYKQGQNQLYNELNLGRREEYDVLDKRRGRDPEMGGKPRRKNPQEGLYNELQKDKMAEAYSEIGMKGERRRGKGHDGLYQGLSTATKDTYDALHMQALPPR

SEQ ID NO: 855 - protein, 482 aa, synthetic construct
  REGION 1..482: note = source = /note="Description of Artificial Sequence: Synthetic polypeptide"
MALPVTALLLPLALLLHAARPEVQLLETGGGLVQPGGSLRLSCAVSGFALSNHGMSWVRRAPGKGLEWVSGIVYSGSTYYAASVKGRFTISRDNSRNTLYLQMNSLRPEDTAIYYCSAHGGESDVWGQGTTVTVSSASGGGGSGGRASGGGGSEIVLTQSPATLSVSPGESATLSCRASQSVSSNLAWYQQKPGQAPRLLIYGASTRASGIPDRFSGSGSGTDFTLTISSLQAEDVAVYYCQQYGSSLTFGGGTKVEIKTTTPAPRPPTPAPTIASQPLSLRPEACRPAAGGAVHTRGLDFACDIYIWAPLAGTCGVLLLSLVITLYCKRGRKKLLYIFKQPFMRPVQTTQEEDGCSCRFPEEEEGGCELRVKFSRSADAPAYKQGQNQLYNELNLGRREEYDVLDKRRGRDPEMGGKPRRKNPQEGLYNELQKDKMAEAYSEIGMKGERRRGKGHDGLYQGLSTATKDTYDALHMQALPPR

SEQ ID NO: 856 - protein, 483 aa, synthetic construct
  REGION 1..483: note = source = /note="Description of Artificial Sequence: Synthetic polypeptide"
MALPVTALLLPLALLLHAARPEVQLVETGGGLVQPGGSLRLSCAVSGFALSNHGMSWVRRAPGKGLEWVSGIVYSGSTYYAASVKGRFTISRDNSRNTLYLQMNSLRPEDTAIYYCSAHGGESDVWGQGTTVTVSSASGGGGSGGRASGGGGSEIVMTQSPATLSVSPGERATLSCRASQSVSSKLAWYQQKPGQAPRLLMYGASIRATGIPDRFSGSGSGTEFTLTISSLEPEDFAVYYCQQYGSSSWTFGQGTKVEIKTTTPAPRPPTPAPTIASQPLSLRPEACRPAAGGAVHTRGLDFACDIYIWAPLAGTCGVLLLSLVITLYCKRGRKKLLYIFKQPFMRPVQTTQEEDGCSCRFPEEEEGGCELRVKFSRSADAPAYKQGQNQLYNELNLGRREEYDVLDKRRGRDPEMGGKPRRKNPQEGLYNELQKDKMAEAYSEIGMKGERRRGKGHDGLYQGLSTATKDTYDALHMQALPPR

SEQ ID NO: 857 - protein, 485 aa, synthetic construct
  REGION 1..485: note = source = /note="Description of Artificial Sequence: Synthetic polypeptide"
MALPVTALLLPLALLLHAARPEVQLVETGGGVVQPGGSLRLSCAVSGFALSNHGMSWVRRAPGKGLEWVSGIVYSGSTYYAASVKGRFTISRDNSRNTLYLQMNSLRPEDTAIYYCSAHGGESDVWGQGTTVTVSSASGGGGSGGRASGGGGSEIVLTQSPGTLSLSPGERATLSCRASQSVGSTNLAWYQQKPGQAPRLLIYDASNRATGIPDRFSGGGSGTDFTLTISRLEPEDFAVYYCQQYGSSPPWTFGQGTKVEIKTTTPAPRPPTPAPTIASQPLSLRPEACRPAAGGAVHTRGLDFACDIYIWAPLAGTCGVLLLSLVITLYCKRGRKKLLYIFKQPFMRPVQTTQEEDGCSCRFPEEEEGGCELRVKFSRSADAPAYKQGQNQLYNELNLGRREEYDVLDKRRGRDPEMGGKPRRKNPQEGLYNELQKDKMAEAYSEIGMKGERRRGKGHDGLYQGLSTATKDTYDALHMQALPPR

SEQ ID NO: 858 - protein, 483 aa, synthetic construct
  REGION 1..483: note = source = /note="Description of Artificial Sequence: Synthetic polypeptide"
MALPVTALLLPLALLLHAARPQVQLVESGGGLVKPGGSLRLSCAASGFTFSDYYMSWIRQAPGKGLEWVSYISSSGSTIYYADSVKGRFTISRDNAKNSLYLQMNSLRAEDTAVYYCARESGDGMDVWGQGTTVTVSSASGGGGSGGRASGGGGSDIQMTQSPSSLSASVGDRVTITCRASQSISSYLNWYQQKPGKAPKLLIYAASSLQSGVPSRFSGSGSGTDFTLTISSLQPEDFATYYCQQSYTLAFGQGTKVDIKTTTPAPRPPTPAPTIASQPLSLRPEACRPAAGGAVHTRGLDFACDIYIWAPLAGTCGVLLLSLVITLYCKRGRKKLLYIFKQPFMRPVQTTQEEDGCSCRFPEEEEGGCELRVKFSRSADAPAYKQGQNQLYNELNLGRREEYDVLDKRRGRDPEMGGKPRRKNPQEGLYNELQKDKMAEAYSEIGMKGERRRGKGHDGLYQGLSTATKDTYDALHMQALPPR

SEQ ID NO: 859 - protein, 483 aa, synthetic construct
  REGION 1..483: note = source = /note="Description of Artificial Sequence: Synthetic polypeptide"
MALPVTALLLPLALLLHAARPEVQLVESGGGLVQPGGSLRLSCAVSGFALSNHGMSWVRRAPGKGLEWVSGIVYSGSTYYAASVKGRFTISRDNSRNTLYLQMNSLRPEDTAIYYCSAHGGESDVWGQGTTVTVSSASGGGGSGGRASGGGGSDIQLTQSPSSLSASVGDRVTITCRASQSISSYLNWYQQKPGKAPKLLIYAASSLQSGVPSRFSGSGSGTDFTLTISSLQPEDFATYYCQQSYSTPYTFGQGTKVEIKTTTPAPRPPTPAPTIASQPLSLRPEACRPAAGGAVHTRGLDFACDIYIWAPLAGTCGVLLLSLVITLYCKRGRKKLLYIFKQPFMRPVQTTQEEDGCSCRFPEEEEGGCELRVKFSRSADAPAYKQGQNQLYNELNLGRREEYDVLDKRRGRDPEMGGKPRRKNPQEGLYNELQKDKMAEAYSEIGMKGERRRGKGHDGLYQGLSTATKDTYDALHMQALPPR

SEQ ID NO: 860 - protein, 490 aa, synthetic construct
  REGION 1..490: note = source = /note="Description of Artificial Sequence: Synthetic polypeptide"
MALPVTALLLPLALLLHAARPQVQLVQSGGGLVKPGGSLRLSCAASGFTFSDYYMSWIRQAPGKGLEWVSYISSSGNTIYYADSVKGRFTISRDNAKNSLYLQMNSLRAEDTAVYYCARSTMVREDYWGQGTLVTVSSASGGGGSGGRASGGGGSDIVLTQSPLSLPVTLGQPASISCKSSESLVHNSGKTYLNWFHQRPGQSPRRLIYEVSNRDSGVPDRFTGSGSGTDFTLKISRVEAEDVGVYYCMQGTHWPGTFGQGTKLEIKTTTPAPRPPTPAPTIASQPLSLRPEACRPAAGGAVHTRGLDFACDIYIWAPLAGTCGVLLLSLVITLYCKRGRKKLLYIFKQPFMRPVQTTQEEDGCSCRFPEEEEGGCELRVKFSRSADAPAYKQGQNQLYNELNLGRREEYDVLDKRRGRDPEMGGKPRRKNPQEGLYNELQKDKMAEAYSEIGMKGERRRGKGHDGLYQGLSTATKDTYDALHMQALPPR

SEQ ID NO: 861 - protein, 483 aa, synthetic construct
  REGION 1..483: note = source = /note="Description of Artificial Sequence: Synthetic polypeptide"
MALPVTALLLPLALLLHAARPQVQLVESGGGLVQPGGSLRLSCAVSGFALSNHGMSWVRRAPGKGLEWVSGIVYSGSTYYAASVKGRFTISRDNSRNTLYLQMNSLRPEDTAIYYCSAHGGESDVWGQGTTVTVSSASGGGGSGGRASGGGGSDIRLTQSPSPLSASVGDRVTITCQASEDINKFLNWYHQTPGKAPKLLIYDASTLQTGVPSRFSGSGSGTDFTLTINSLQPEDIGTYYCQQYESLPLTFGGGTKVEIKTTTPAPRPPTPAPTIASQPLSLRPEACRPAAGGAVHTRGLDFACDIYIWAPLAGTCGVLLLSLVITLYCKRGRKKLLYIFKQPFMRPVQTTQEEDGCSCRFPEEEEGGCELRVKFSRSADAPAYKQGQNQLYNELNLGRREEYDVLDKRRGRDPEMGGKPRRKNPQEGLYNELQKDKMAEAYSEIGMKGERRRGKGHDGLYQGLSTATKDTYDALHMQALPPR

SEQ ID NO: 862 - protein, 484 aa, synthetic construct
  REGION 1..484: note = source = /note="Description of Artificial Sequence: Synthetic polypeptide"
MALPVTALLLPLALLLHAARPEVQLVETGGGLVQPGGSLRLSCAVSGFALSNHGMSWVRRAPGKGLEWVSGIVYSGSTYYAASVKGRFTISRDNSRNTLYLQMNSLRPEDTAIYYCSAHGGESDVWGQGTTVTVSSASGGGGSGGRASGGGGSETTLTQSPATLSVSPGERATLSCRASQSVGSNLAWYQQKPGQGPRLLIYGASTRATGIPARFSGSGSGTEFTLTISSLQPEDFAVYYCQQYNDWLPVTFGQGTKVEIKTTTPAPRPPTPAPTIASQPLSLRPEACRPAAGGAVHTRGLDFACDIYIWAPLAGTCGVLLLSLVITLYCKRGRKKLLYIFKQPFMRPVQTTQEEDGCSCRFPEEEEGGCELRVKFSRSADAPAYKQGQNQLYNELNLGRREEYDVLDKRRGRDPEMGGKPRRKNPQEGLYNELQKDKMAEAYSEIGMKGERRRGKGHDGLYQGLSTATKDTYDALHMQALPPR

SEQ ID NO: 863 - protein, 485 aa, synthetic construct
  REGION 1..485: note = source = /note="Description of Artificial Sequence: Synthetic polypeptide"
MALPVTALLLPLALLLHAARPEVQLVESGGGLVQPGGSLRLSCAVSGFALSNHGMSWVRRAPGKGLEWVSGIVYSGSTYYAASVKGRFTISRDNSRNTLYLQMNSLRPEDTAIYYCSAHGGESDVWGQGTTVTVSSASGGGGSGGRASGGGGSEIVLTQSPGTLSLSPGERATLSCRASQSIGSSSLAWYQQKPGQAPRLLMYGASSRASGIPDRFSGSGSGTDFTLTISRLEPEDFAVYYCQQYAGSPPFTFGQGTKVEIKTTTPAPRPPTPAPTIASQPLSLRPEACRPAAGGAVHTRGLDFACDIYIWAPLAGTCGVLLLSLVITLYCKRGRKKLLYIFKQPFMRPVQTTQEEDGCSCRFPEEEEGGCELRVKFSRSADAPAYKQGQNQLYNELNLGRREEYDVLDKRRGRDPEMGGKPRRKNPQEGLYNELQKDKMAEAYSEIGMKGERRRGKGHDGLYQGLSTATKDTYDALHMQALPPR

SEQ ID NO: 864 - DNA, 1470 bp, synthetic construct
  misc_feature 1..1470: note = source = /note="Description of Artificial Sequence: Synthetic polynucleotide"
  source 1..1470: mol_type = other DNA
atggccctccctgtcaccgccctgctgcttccgctggctcttctgctccacgccgctcggccccaagtgcaactcgtggaatctggtggaggactcgtgcaacccggaagatcgcttagactgtcgtgtgccgccagcgggttcactttctcgaactacgcgatgtcctgggtccgccaggcacccggaaagggactcggttgggtgtccggcatttcccggtccggcgaaaatacctactacgccgactccgtgaagggccgcttcaccatctcaagggacaacagcaaaaacaccctgtacttgcaaatgaactccctgcgggatgaagatacagccgtgtactattgcgcccggtcgcctgcccattactacggcggaatggacgtctggggacagggaaccactgtgactgtcagcagcgcgtcgggtggcggcggctcagggggtcgggcctccggggggggagggtccgacatcgtgctgacccagtccccgggaaccctgagcctgagcccgggagagcgcgcgaccctgtcatgccgggcatcccagagcattagctcctcctttctcgcctggtatcagcagaagcccggacaggccccgaggctgctgatctacggcgctagcagaagggctaccggaatcccagaccggttctccggctccggttccgggaccgatttcacccttactatctcgcgcctggaacctgaggactccgccgtctactactgccagcagtaccactcatccccgtcgtggacgttcggacagggcaccaagctggagattaagaccactaccccagcaccgaggccacccaccccggctcctaccatcgcctcccagcctctgtccctgcgtccggaggcatgtagacccgcagctggtggggccgtgcatacccggggtcttgacttcgcctgcgatatctacatttgggcccctctggctggtacttgcggggtcctgctgctttcactcgtgatcactctttactgtaagcgcggtcggaagaagctgctgtacatctttaagcaacccttcatgaggcctgtgcagactactcaagaggaggacggctgttcatgccggttcccagaggaggaggaaggcggctgcgaactgcgcgtgaaattcagccgcagcgcagatgctccagcctacaagcaggggcagaaccagctctacaacgaactcaatcttggtcggagagaggagtacgacgtgctggacaagcggagaggacgggacccagaaatgggcgggaagccgcgcagaaagaatccccaagagggcctgtacaacgagctccaaaaggataagatggcagaagcctatagcgagattggtatgaaaggggaacgcagaagaggcaaaggccacgacggactgtaccagggactcagcaccgccaccaaggacacctatgacgctcttcacatgcaggccctgccgcctcgg

SEQ ID NO: 865 - DNA, 1464 bp, synthetic construct
  misc_feature 1..1464: note = source = /note="Description of Artificial Sequence: Synthetic polynucleotide"
  source 1..1464: mol_type = other DNA
atggccctccctgtcaccgccctgctgcttccgctggctcttctgctccacgccgctcggccccaagtgcaactcgtcgaatccggtggaggtctggtccaacctggtagaagcctgagactgtcgtgtgcggccagcggattcacctttgatgactatgctatgcactgggtgcggcaggccccaggaaagggcctggaatgggtgtcgggaattagctggaactccgggtccattggctacgccgactccgtgaagggccgcttcaccatctcccgcgacaacgcaaagaactccctgtacttgcaaatgaactcgctcagggctgaggataccgcgctgtactactgctccgtgcattccttcctggcctactggggacagggaactctggtcaccgtgtcgagcgcctccggcggcgggggctcgggtggacgggcctcgggcggaggggggtccgacatcgtgatgacccagaccccgctgagcttgcccgtgactcccggagagcctgcatccatctcctgccggtcatcccagtcccttctccactccaacggatacaactacctcgactggtacctccagaagccgggacagagccctcagcttctgatctacctggggtcaaatagagcctcaggagtgccggatcggttcagcggatctggttcgggaactgatttcactctgaagatttcccgcgtggaagccgaggacgtgggcgtctactactgtatgcaggcgctgcagaccccctataccttcggccaagggacgaaagtggagatcaagaccactaccccagcaccgaggccacccaccccggctcctaccatcgcctcccagcctctgtccctgcgtccggaggcatgtagacccgcagctggtggggccgtgcatacccggggtcttgacttcgcctgcgatatctacatttgggcccctctggctggtacttgcggggtcctgctgctttcactcgtgatcactctttactgtaagcgcggtcggaagaagctgctgtacatctttaagcaacccttcatgaggcctgtgcagactactcaagaggaggacggctgttcatgccggttcccagaggaggaggaaggcggctgcgaactgcgcgtgaaattcagccgcagcgcagatgctccagcctacaagcaggggcagaaccagctctacaacgaactcaatcttggtcggagagaggagtacgacgtgctggacaagcggagaggacgggacccagaaatgggcgggaagccgcgcagaaagaatccccaagagggcctgtacaacgagctccaaaaggataagatggcagaagcctatagcgagattggtatgaaaggggaacgcagaagaggcaaaggccacgacggactgtaccagggactcagcaccgccaccaaggacacctatgacgctcttcacatgcaggccctgccgcctcgg

SEQ ID NO: 866 - DNA, 1461 bp, synthetic construct
  misc_feature 1..1461: note = source = /note="Description of Artificial Sequence: Synthetic polynucleotide"
  source 1..1461: mol_type = other DNA
atggccctccctgtcaccgccctgctgcttccgctggctcttctgctccacgccgctcggcccgaagtgcaattgttggaatctggaggaggacttgtgcagcctggaggatcactgagactttcgtgtgcggtgtcaggcttcgccctgagcaaccacggcatgagctgggtgcggagagccccggggaagggtctggaatgggtgtccgggatcgtctactccggttcaacttactacgccgcaagcgtgaagggtcgcttcaccatttcccgcgataactcccggaacaccctgtacctccaaatgaactccctgcggcccgaggacaccgccatctactactgttccgcgcatggaggagagtccgatgtctggggacagggcactaccgtgaccgtgtcgagcgcctcggggggaggaggctccggcggtcgcgcctccggggggggtggcagcgacattgtgatgacgcagactccactctcgctgtccgtgaccccgggacagcccgcgtccatctcgtgcaagagctcccagagcctgctgaggaacgacggaaagactcctctgtattggtacctccagaaggctggacagcccccgcaactgctcatctacgaagtgtcaaatcgcttctccggggtgccggatcggttttccggctcgggatcgggcaccgacttcaccctgaaaatctccagggtcgaggccgaggacgtgggagcctactactgcatgcaaaacatccagttcccttccttcggcggcggcacaaagctggagattaagaccactaccccagcaccgaggccacccaccccggctcctaccatcgcctcccagcctctgtccctgcgtccggaggcatgtagacccgcagctggtggggccgtgcatacccggggtcttgacttcgcctgcgatatctacatttgggcccctctggctggtacttgcggggtcctgctgctttcactcgtgatcactctttactgtaagcgcggtcggaagaagctgctgtacatctttaagcaacccttcatgaggcctgtgcagactactcaagaggaggacggctgttcatgccggttcccagaggaggaggaaggcggctgcgaactgcgcgtgaaattcagccgcagcgcagatgctccagcctacaagcaggggcagaaccagctctacaacgaactcaatcttggtcggagagaggagtacgacgtgctggacaagcggagaggacgggacccagaaatgggcgggaagccgcgcagaaagaatccccaagagggcctgtacaacgagctccaaaaggataagatggcagaagcctatagcgagattggtatgaaaggggaacgcagaagaggcaaaggccacgacggactgtaccagggactcagcaccgccaccaaggacacctatgacgctcttcacatgcaggccctgccgcctcgg

SEQ ID NO: 867 - DNA, 1479 bp, synthetic construct
  misc_feature 1..1479: note = source = /note="Description of Artificial Sequence: Synthetic polynucleotide"
  source 1..1479: mol_type = other DNA
atggccctccctgtcaccgccctgctgcttccgctggctcttctgctccacgccgctcggccccaagtccaactcgtccagtccggcgcagaagtcagaaaaaccggtgctagcgtgaaagtgtcctgcaaggcctccggctacattttcgataacttcggaatcaactgggtcagacaggccccgggccaggggctggaatggatgggatggatcaaccccaagaacaacaacaccaactacgcacagaagttccagggccgcgtgactatcaccgccgatgaatcgaccaataccgcctacatggaggtgtcctccctgcggtcggaggacactgccgtgtattactgcgcgaggggcccatactactaccaaagctacatggacgtctggggacagggaaccatggtgaccgtgtcatccgcctccggtggtggaggctccggggggcgggcttcaggaggcggaggaagcgatattgtgatgacccagactccgcttagcctgcccgtgactcctggagaaccggcctccatttcctgccggtcctcgcaatcactcctgcattccaacggttacaactacctgaattggtacctccagaagcctggccagtcgccccagttgctgatctatctgggctcgaagcgcgcctccggggtgcctgaccggtttagcggatctgggagcggcacggacttcactctccacatcacccgcgtgggagcggaggacgtgggagtgtactactgtatgcaggcgctgcagactccgtacacattcggacagggcaccaagctggagatcaagaccactaccccagcaccgaggccacccaccccggctcctaccatcgcctcccagcctctgtccctgcgtccggaggcatgtagacccgcagctggtggggccgtgcatacccggggtcttgacttcgcctgcgatatctacatttgggcccctctggctggtacttgcggggtcctgctgctttcactcgtgatcactctttactgtaagcgcggtcggaagaagctgctgtacatctttaagcaacccttcatgaggcctgtgcagactactcaagaggaggacggctgttcatgccggttcccagaggaggaggaaggcggctgcgaactgcgcgtgaaattcagccgcagcgcagatgctccagcctacaagcaggggcagaaccagctctacaacgaactcaatcttggtcggagagaggagtacgacgtgctggacaagcggagaggacgggacccagaaatgggcgggaagccgcgcagaaagaatccccaagagggcctgtacaacgagctccaaaaggataagatggcagaagcctatagcgagattggtatgaaaggggaacgcagaagaggcaaaggccacgacggactgtaccagggactcagcaccgccaccaaggacacctatgacgctcttcacatgcaggccctgccgcctcgg

SEQ ID NO: 868 - DNA, 1470 bp, synthetic construct
  misc_feature 1..1470: note = source = /note="Description of Artificial Sequence: Synthetic polynucleotide"
  source 1..1470: mol_type = other DNA
atggccctccctgtcaccgccctgctgcttccgctggctcttctgctccacgccgctcggccccaagtgcaacttcaagaatcaggcggaggactcgtgcagcccggaggatcattgcggctctcgtgcgccgcctcgggcttcaccttctcgagcgacgccatgacctgggtccgccaggccccggggaaggggctggaatgggtgtctgtgatttccggctccgggggaactacgtactacgccgattccgtgaaaggtcgcttcactatctcccgggacaacagcaagaacaccctttatctgcaaatgaattccctccgcgccgaggacaccgccgtgtactactgcgccaagctggactcctcgggctactactatgcccggggtccgagatactggggacagggaaccctcgtgaccgtgtcctccgcgtccggcggaggagggtcgggagggcgggcctccggcggcggcggttcggacatccagctgacccagtccccatcctcactgagcgcaagcgtgggcgacagagtcaccattacatgcagggcgtcccagagcatcagctcctacctgaactggtaccaacagaagcctggaaaggctcctaagctgttgatctacggggcttcgaccctggcatccggggtgcccgcgaggtttagcggaagcggtagcggcactcacttcactctgaccattaacagcctccagtccgaggattcagccacttactactgtcagcagtcctacaagcgggccagcttcggacagggcactaaggtcgagatcaagaccactaccccagcaccgaggccacccaccccggctcctaccatcgcctcccagcctctgtccctgcgtccggaggcatgtagacccgcagctggtggggccgtgcatacccggggtcttgacttcgcctgcgatatctacatttgggcccctctggctggtacttgcggggtcctgctgctttcactcgtgatcactctttactgtaagcgcggtcggaagaagctgctgtacatctttaagcaacccttcatgaggcctgtgcagactactcaagaggaggacggctgttcatgccggttcccagaggaggaggaaggcggctgcgaactgcgcgtgaaattcagccgcagcgcagatgctccagcctacaagcaggggcagaaccagctctacaacgaactcaatcttggtcggagagaggagtacgacgtgctggacaagcggagaggacgggacccagaaatgggcgggaagccgcgcagaaagaatccccaagagggcctgtacaacgagctccaaaaggataagatggcagaagcctatagcgagattggtatgaaaggggaacgcagaagaggcaaaggccacgacggactgtaccagggactcagcaccgccaccaaggacacctatgacgctcttcacatgcaggccctgccgcctcgg

SEQ ID NO: 869 - DNA, 1473 bp, synthetic construct
  misc_feature 1..1473: note = source = /note="Description of Artificial Sequence: Synthetic polynucleotide"
  source 1..1473: mol_type = other DNA
atggccctccctgtcaccgccctgctgcttccgctggctcttctgctccacgccgctcggccccaagtccaactggtccagagcggtgcagaagtgaagaagcccggagcgagcgtgaaagtgtcctgcaaggcttccgggtacaccttctccaactacggcatcacttgggtgcgccaggccccgggacagggcctggaatggatggggtggatttccgcgtacaacggcaatacgaactacgctcagaagttccagggtagagtgaccatgactaggaacacctccatttccaccgcctacatggaactgtcctccctgcggagcgaggacaccgccgtgtactattgcgcccggggaccatactactactacatggatgtctgggggaaggggactatggtcaccgtgtcatccgcctcgggaggcggcggatcaggaggacgcgcctctggtggtggaggatcggagatcgtgatgacccagagccctctctccttgcccgtgactcctggggagcccgcatccatttcatgccggagctcccagtcacttctctactccaacggctataactacgtggattggtacctccaaaagccgggccagagcccgcagctgctgatctacctgggctcgaacagggccagcggagtgcctgaccggttctccgggtcgggaagcgggaccgacttcaagctgcaaatctcgagagtggaggccgaggacgtgggaatctactactgtatgcagggccgccagtttccgtactcgttcggacagggcaccaaagtggaaatcaagaccactaccccagcaccgaggccacccaccccggctcctaccatcgcctcccagcctctgtccctgcgtccggaggcatgtagacccgcagctggtggggccgtgcatacccggggtcttgacttcgcctgcgatatctacatttgggcccctctggctggtacttgcggggtcctgctgctttcactcgtgatcactctttactgtaagcgcggtcggaagaagctgctgtacatctttaagcaacccttcatgaggcctgtgcagactactcaagaggaggacggctgttcatgccggttcccagaggaggaggaaggcggctgcgaactgcgcgtgaaattcagccgcagcgcagatgctccagcctacaagcaggggcagaaccagctctacaacgaactcaatcttggtcggagagaggagtacgacgtgctggacaagcggagaggacgggacccagaaatgggcgggaagccgcgcagaaagaatccccaagagggcctgtacaacgagctccaaaaggataagatggcagaagcctatagcgagattggtatgaaaggggaacgcagaagaggcaaaggccacgacggactgtaccagggactcagcaccgccaccaaggacacctatgacgctcttcacatgcaggccctgccgcctcgg

SEQ ID NO: 870 - DNA, 1446 bp, synthetic construct
  misc_feature 1..1446: note = source = /note="Description of Artificial Sequence: Synthetic polynucleotide"
  source 1..1446: mol_type = other DNA
atggccctccctgtcaccgccctgctgcttccgctggctcttctgctccacgccgctcggcccgaagtgcaattgctcgaaactggaggaggtctggtgcaacctggaggatcacttcgcctgtcctgcgccgtgtcgggctttgccctgtccaaccatggaatgagctgggtccgccgcgcgccggggaagggcctcgaatgggtgtccggcatcgtctactccggctccacctactacgccgcgtccgtgaagggccggttcacgatttcacgggacaactcgcggaacaccctgtacctccaaatgaattcccttcggccggaggatactgccatctactactgctccgcccacggtggcgaatccgacgtctggggccagggaaccaccgtgaccgtgtccagcgcgtccgggggaggaggaagcgggggtagagcatcgggtggaggcggatcagagatcgtgctgacccagtcccccgccaccttgagcgtgtcaccaggagagtccgccaccctgtcatgccgcgccagccagtccgtgtcctccaacctggcttggtaccagcagaagccggggcaggcccctagactcctgatctatggggcgtcgacccgggcatctggaattcccgataggttcagcggatcgggctcgggcactgacttcactctgaccatctcctcgctgcaagccgaggacgtggctgtgtactactgtcagcagtacggaagctccctgactttcggtggcgggaccaaagtcgagattaagaccactaccccagcaccgaggccacccaccccggctcctaccatcgcctcccagcctctgtccctgcgtccggaggcatgtagacccgcagctggtggggccgtgcatacccggggtcttgacttcgcctgcgatatctacatttgggcccctctggctggtacttgcggggtcctgctgctttcactcgtgatcactctttactgtaagcgcggtcggaagaagctgctgtacatctttaagcaacccttcatgaggcctgtgcagactactcaagaggaggacggctgttcatgccggttcccagaggaggaggaaggcggctgcgaactgcgcgtgaaattcagccgcagcgcagatgctccagcctacaagcaggggcagaaccagctctacaacgaactcaatcttggtcggagagaggagtacgacgtgctggacaagcggagaggacgggacccagaaatgggcgggaagccgcgcagaaagaatccccaagagggcctgtacaacgagctccaaaaggataagatggcagaagcctatagcgagattggtatgaaaggggaacgcagaagaggcaaaggccacgacggactgtaccagggactcagcaccgccaccaaggacacctatgacgctcttcacatgcaggccctgccgcctcgg

SEQ ID NO: 871 - DNA, 1449 bp, synthetic construct
  misc_feature 1..1449: note = source = /note="Description of Artificial Sequence: Synthetic polynucleotide"
  source 1..1449: mol_type = other DNA
atggccctccctgtcaccgccctgctgcttccgctggctcttctgctccacgccgctcggcccgaagtgcaattggtggaaactggaggaggacttgtgcaacctggaggatcattgagactgagctgcgcagtgtcgggattcgccctgagcaaccatggaatgtcctgggtcagaagggcccctggaaaaggcctcgaatgggtgtcagggatcgtgtactccggttccacttactacgccgcctccgtgaaggggcgcttcactatctcacgggataactcccgcaataccctgtacctccaaatgaacagcctgcggccggaggataccgccatctactactgttccgcccacggtggagagtctgacgtctggggccagggaactaccgtgaccgtgtcctccgcgtccggcggtggagggagcggcggccgcgccagcggcggcggaggctccgagatcgtgatgacccagagccccgctactctgtcggtgtcgcccggagaaagggcgaccctgtcctgccgggcgtcgcagtccgtgagcagcaagctggcttggtaccagcagaagccgggccaggcaccacgcctgcttatgtacggtgcctccattcgggccaccggaatcccggaccggttctcggggtcggggtccggtaccgagttcacactgaccatttcctcgctcgagcccgaggactttgccgtctattactgccagcagtacggctcctcctcatggacgttcggccaggggaccaaggtcgaaatcaagaccactaccccagcaccgaggccacccaccccggctcctaccatcgcctcccagcctctgtccctgcgtccggaggcatgtagacccgcagctggtggggccgtgcatacccggggtcttgacttcgcctgcgatatctacatttgggcccctctggctggtacttgcggggtcctgctgctttcactcgtgatcactctttactgtaagcgcggtcggaagaagctgctgtacatctttaagcaacccttcatgaggcctgtgcagactactcaagaggaggacggctgttcatgccggttcccagaggaggaggaaggcggctgcgaactgcgcgtgaaattcagccgcagcgcagatgctccagcctacaagcaggggcagaaccagctctacaacgaactcaatcttggtcggagagaggagtacgacgtgctggacaagcggagaggacgggacccagaaatgggcgggaagccgcgcagaaagaatccccaagagggcctgtacaacgagctccaaaaggataagatggcagaagcctatagcgagattggtatgaaaggggaacgcagaagaggcaaaggccacgacggactgtaccagggactcagcaccgccaccaaggacacctatgacgctcttcacatgcaggccctgccgcctcgg

SEQ ID NO: 872 - DNA, 1455 bp, synthetic construct
  misc_feature 1..1455: note = source = /note="Description of Artificial Sequence: Synthetic polynucleotide"
  source 1..1455: mol_type = other DNA
atggccctccctgtcaccgccctgctgcttccgctggctcttctgctccacgccgctcggcccgaagtgcaattggtggagactggaggaggagtggtgcaacctggaggaagcctgagactgtcatgcgcggtgtcgggcttcgccctctccaaccacggaatgtcctgggtccgccgggcccctgggaaaggacttgaatgggtgtccggcatcgtgtactcgggttccacctactacgcggcctcagtgaagggccggtttactattagccgcgacaactccagaaacacactgtacctccaaatgaactcgctgcggccggaagataccgctatctactactgctccgcccatgggggagagtcggacgtctggggacagggcaccactgtcactgtgtccagcgcttccggcggtggtggaagcgggggacgggcctcaggaggcggtggcagcgagattgtgctgacccagtcccccgggaccctgagcctgtccccgggagaaagggccaccctctcctgtcgggcatcccagtccgtggggtctactaaccttgcatggtaccagcagaagcccggccaggcccctcgcctgctgatctacgacgcgtccaatagagccaccggcatcccggatcgcttcagcggaggcggatcgggcaccgacttcaccctcaccatttcaaggctggaaccggaggacttcgccgtgtactactgccagcagtatggttcgtccccaccctggacgttcggccaggggactaaggtcgagatcaagaccactaccccagcaccgaggccacccaccccggctcctaccatcgcctcccagcctctgtccctgcgtccggaggcatgtagacccgcagctggtggggccgtgcatacccggggtcttgacttcgcctgcgatatctacatttgggcccctctggctggtacttgcggggtcctgctgctttcactcgtgatcactctttactgtaagcgcggtcggaagaagctgctgtacatctttaagcaacccttcatgaggcctgtgcagactactcaagaggaggacggctgttcatgccggttcccagaggaggaggaaggcggctgcgaactgcgcgtgaaattcagccgcagcgcagatgctccagcctacaagcaggggcagaaccagctctacaacgaactcaatcttggtcggagagaggagtacgacgtgctggacaagcggagaggacgggacccagaaatgggcgggaagccgcgcagaaagaatccccaagagggcctgtacaacgagctccaaaaggataagatggcagaagcctatagcgagattggtatgaaaggggaacgcagaagaggcaaaggccacgacggactgtaccagggactcagcaccgccaccaaggacacctatgacgctcttcacatgcaggccctgccgcctcgg

SEQ ID NO: 873 - DNA, 1449 bp, synthetic construct
  misc_feature 1..1449: note = source = /note="Description of Artificial Sequence: Synthetic polynucleotide"
  source 1..1449: mol_type = other DNA
atggccctccctgtcaccgccctgctgcttccgctggctcttctgctccacgccgctcggccccaagtgcaactcgtggaatctggtggaggactcgtgaaacctggaggatcattgagactgtcatgcgcggcctcgggattcacgttctccgattactacatgagctggattcgccaggctccggggaagggactggaatgggtgtcctacatttcctcatccggctccaccatctactacgcggactccgtgaaggggagattcaccattagccgcgataacgccaagaacagcctgtaccttcagatgaactccctgcgggctgaagatactgccgtctactactgcgcaagggagagcggagatgggatggacgtctggggacagggtaccactgtgaccgtgtcgtcggcctccggcggagggggttcgggtggaagggccagcggcggcggaggcagcgacatccagatgacccagtccccctcatcgctgtccgcctccgtgggcgaccgcgtcaccatcacatgccgggcctcacagtcgatctcctcctacctcaattggtatcagcagaagcccggaaaggcccctaagcttctgatctacgcagcgtcctccctgcaatccggggtcccatctcggttctccggctcgggcagcggtaccgacttcactctgaccatctcgagcctgcagccggaggacttcgccacttactactgtcagcaaagctacaccctcgcgtttggccagggcaccaaagtggacatcaagaccactaccccagcaccgaggccacccaccccggctcctaccatcgcctcccagcctctgtccctgcgtccggaggcatgtagacccgcagctggtggggccgtgcatacccggggtcttgacttcgcctgcgatatctacatttgggcccctctggctggtacttgcggggtcctgctgctttcactcgtgatcactctttactgtaagcgcggtcggaagaagctgctgtacatctttaagcaacccttcatgaggcctgtgcagactactcaagaggaggacggctgttcatgccggttcccagaggaggaggaaggcggctgcgaactgcgcgtgaaattcagccgcagcgcagatgctccagcctacaagcaggggcagaaccagctctacaacgaactcaatcttggtcggagagaggagtacgacgtgctggacaagcggagaggacgggacccagaaatgggcgggaagccgcgcagaaagaatccccaagagggcctgtacaacgagctccaaaaggataagatggcagaagcctatagcgagattggtatgaaaggggaacgcagaagaggcaaaggccacgacggactgtaccagggactcagcaccgccaccaaggacacctatgacgctcttcacatgcaggccctgccgcctcgg

SEQ ID NO: 874 - DNA, 1449 bp, synthetic construct
  misc_feature 1..1449: note = source = /note="Description of Artificial Sequence: Synthetic polynucleotide"
  source 1..1449: mol_type = other DNA
atggccctccctgtcaccgccctgctgcttccgctggctcttctgctccacgccgctcggcccgaagtgcaattggtggaatcagggggaggacttgtgcagcctggaggatcgctgagactgtcatgtgccgtgtccggctttgccctgtccaaccacgggatgtcctgggtccgccgcgcgcctggaaagggcctcgaatgggtgtcgggtattgtgtacagcggtagcacctactatgccgcatccgtgaaggggagattcaccatcagccgggacaactccaggaacactctgtacctccaaatgaattcgctgaggccagaggacactgccatctactactgctccgcgcatggcggagagtccgacgtctggggacaggggaccaccgtgaccgtgtctagcgcgtccggcggaggcggcagcgggggtcgggcatcagggggcggcggatcggacatccagctcacccagtccccgagctcgctgtccgcctccgtgggagatcgggtcaccatcacgtgccgcgccagccagtcgatttcctcctacctgaactggtaccaacagaagcccggaaaagccccgaagcttctcatctacgccgcctcgagcctgcagtcaggagtgccctcacggttctccggctccggttccggtactgatttcaccctgaccatttcctccctgcaaccggaggacttcgctacttactactgccagcagtcgtactccaccccctacactttcggacaaggcaccaaggtcgaaatcaagaccactaccccagcaccgaggccacccaccccggctcctaccatcgcctcccagcctctgtccctgcgtccggaggcatgtagacccgcagctggtggggccgtgcatacccggggtcttgacttcgcctgcgatatctacatttgggcccctctggctggtacttgcggggtcctgctgctttcactcgtgatcactctttactgtaagcgcggtcggaagaagctgctgtacatctttaagcaacccttcatgaggcctgtgcagactactcaagaggaggacggctgttcatgccggttcccagaggaggaggaaggcggctgcgaactgcgcgtgaaattcagccgcagcgcagatgctccagcctacaagcaggggcagaaccagctctacaacgaactcaatcttggtcggagagaggagtacgacgtgctggacaagcggagaggacgggacccagaaatgggcgggaagccgcgcagaaagaatccccaagagggcctgtacaacgagctccaaaaggataagatggcagaagcctatagcgagattggtatgaaaggggaacgcagaagaggcaaaggccacgacggactgtaccagggactcagcaccgccaccaaggacacctatgacgctcttcacatgcaggccctgccgcctcgg

SEQ ID NO: 875 - DNA, 1470 bp, synthetic construct
  misc_feature 1..1470: note = source = /note="Description of Artificial Sequence: Synthetic polynucleotide"
  source 1..1470: mol_type = other DNA
atggccctccctgtcaccgccctgctgcttccgctggctcttctgctccacgccgctcggccccaagtgcaactggtgcaaagcggaggaggattggtcaaacccggaggaagcctgagactgtcatgcgcggcctctggattcaccttctccgattactacatgtcatggatcagacaggccccggggaagggcctcgaatgggtgtcctacatctcgtcctccgggaacaccatctactacgccgacagcgtgaagggccgctttaccatttcccgcgacaacgcaaagaactcgctgtaccttcagatgaattccctgcgggctgaagataccgcggtgtactattgcgcccggtccactatggtccgggaggactactggggacagggcacactcgtgaccgtgtccagcgcgagcgggggtggaggcagcggtggacgcgcctccggcggcggcggttcagacatcgtgctgactcagtcgcccctgtcgctgccggtcaccctgggccaaccggcctcaattagctgcaagtcctcggagagcctggtgcacaactcaggaaagacttacctgaactggttccatcagcggcctggacagtccccacggaggctcatctatgaagtgtccaacagggattcgggggtgcccgaccgcttcactggctccgggtccggcaccgacttcaccttgaaaatctccagagtggaagccgaggacgtgggcgtgtactactgtatgcagggtacccactggcctggaacctttggacaaggaactaagctcgagattaagaccactaccccagcaccgaggccacccaccccggctcctaccatcgcctcccagcctctgtccctgcgtccggaggcatgtagacccgcagctggtggggccgtgcatacccggggtcttgacttcgcctgcgatatctacatttgggcccctctggctggtacttgcggggtcctgctgctttcactcgtgatcactctttactgtaagcgcggtcggaagaagctgctgtacatctttaagcaacccttcatgaggcctgtgcagactactcaagaggaggacggctgttcatgccggttcccagaggaggaggaaggcggctgcgaactgcgcgtgaaattcagccgcagcgcagatgctccagcctacaagcaggggcagaaccagctctacaacgaactcaatcttggtcggagagaggagtacgacgtgctggacaagcggagaggacgggacccagaaatgggcgggaagccgcgcagaaagaatccccaagagggcctgtacaacgagctccaaaaggataagatggcagaagcctatagcgagattggtatgaaaggggaacgcagaagaggcaaaggccacgacggactgtaccagggactcagcaccgccaccaaggacacctatgacgctcttcacatgcaggccctgccgcctcgg

SEQ ID NO: 876 - DNA, 1449 bp, synthetic construct
  misc_feature 1..1449: note = source = /note="Description of Artificial Sequence: Synthetic polynucleotide"
  source 1..1449: mol_type = other DNA
atggccctccctgtcaccgccctgctgcttccgctggctcttctgctccacgccgctcggccccaagtgcaactcgtggaatctggtggaggactcgtgcaacccggtggaagccttaggctgtcgtgcgccgtcagcgggtttgctctgagcaaccatggaatgtcctgggtccgccgggcaccgggaaaagggctggaatgggtgtccggcatcgtgtacagcgggtcaacctattacgccgcgtccgtgaagggcagattcactatctcaagagacaacagccggaacaccctgtacttgcaaatgaattccctgcgccccgaggacaccgccatctactactgctccgcccacggaggagagtcggacgtgtggggccagggaacgactgtgactgtgtccagcgcatcaggagggggtggttcgggcggccgggcctcggggggaggaggttccgacattcggctgacccagtccccgtccccactgtcggcctccgtcggcgaccgcgtgaccatcacttgtcaggcgtccgaggacattaacaagttcctgaactggtaccaccagacccctggaaaggcccccaagctgctgatctacgatgcctcgacccttcaaactggagtgcctagccggttctccgggtccggctccggcactgatttcactctgaccatcaactcattgcagccggaagatatcgggacctactattgccagcagtacgaatccctcccgctcacattcggcgggggaaccaaggtcgagattaagaccactaccccagcaccgaggccacccaccccggctcctaccatcgcctcccagcctctgtccctgcgtccggaggcatgtagacccgcagctggtggggccgtgcatacccggggtcttgacttcgcctgcgatatctacatttgggcccctctggctggtacttgcggggtcctgctgctttcactcgtgatcactctttactgtaagcgcggtcggaagaagctgctgtacatctttaagcaacccttcatgaggcctgtgcagactactcaagaggaggacggctgttcatgccggttcccagaggaggaggaaggcggctgcgaactgcgcgtgaaattcagccgcagcgcagatgctccagcctacaagcaggggcagaaccagctctacaacgaactcaatcttggtcggagagaggagtacgacgtgctggacaagcggagaggacgggacccagaaatgggcgggaagccgcgcagaaagaatccccaagagggcctgtacaacgagctccaaaaggataagatggcagaagcctatagcgagattggtatgaaaggggaacgcagaagaggcaaaggccacgacggactgtaccagggactcagcaccgccaccaaggacacctatgacgctcttcacatgcaggccctgccgcctcgg

SEQ ID NO: 877 - DNA, 1452 bp, synthetic construct
  misc_feature 1..1452: note = source = /note="Description of Artificial Sequence: Synthetic polynucleotide"
  source 1..1452: mol_type = other DNA
atggccctccctgtcaccgccctgctgcttccgctggctcttctgctccacgccgctcggcccgaagtgcaattggtggaaactggaggaggacttgtgcaacctggaggatcattgcggctctcatgcgctgtctccggcttcgccctgtcaaatcacgggatgtcgtgggtcagacgggccccgggaaagggtctggaatgggtgtcggggattgtgtacagcggctccacctactacgccgcttcggtcaagggccgcttcactatttcacgggacaacagccgcaacaccctctatctgcaaatgaactctctccgcccggaggataccgccatctactactgctccgcacacggcggcgaatccgacgtgtggggacagggaaccactgtcaccgtgtcgtccgcatccggtggcggaggatcgggtggccgggcctccgggggcggcggcagcgagactaccctgacccagtcccctgccactctgtccgtgagcccgggagagagagccacccttagctgccgggccagccagagcgtgggctccaacctggcctggtaccagcagaagccaggacagggtcccaggctgctgatctacggagcctccactcgcgcgaccggcatccccgcgaggttctccgggtcgggttccgggaccgagttcaccctgaccatctcctccctccaaccggaggacttcgcggtgtactactgtcagcagtacaacgattggctgcccgtgacatttggacaggggacgaaggtggaaatcaaaaccactaccccagcaccgaggccacccaccccggctcctaccatcgcctcccagcctctgtccctgcgtccggaggcatgtagacccgcagctggtggggccgtgcatacccggggtcttgacttcgcctgcgatatctacatttgggcccctctggctggtacttgcggggtcctgctgctttcactcgtgatcactctttactgtaagcgcggtcggaagaagctgctgtacatctttaagcaacccttcatgaggcctgtgcagactactcaagaggaggacggctgttcatgccggttcccagaggaggaggaaggcggctgcgaactgcgcgtgaaattcagccgcagcgcagatgctccagcctacaagcaggggcagaaccagctctacaacgaactcaatcttggtcggagagaggagtacgacgtgctggacaagcggagaggacgggacccagaaatgggcgggaagccgcgcagaaagaatccccaagagggcctgtacaacgagctccaaaaggataagatggcagaagcctatagcgagattggtatgaaaggggaacgcagaagaggcaaaggccacgacggactgtaccagggactcagcaccgccaccaaggacacctatgacgctcttcacatgcaggccctgccgcctcgg

SEQ ID NO: 878 - DNA, 1455 bp, synthetic construct
  misc_feature 1..1455: note = source = /note="Description of Artificial Sequence: Synthetic polynucleotide"
  source 1..1455: mol_type = other DNA
atggccctccctgtcaccgccctgctgcttccgctggctcttctgctccacgccgctcggcccgaagtgcaattggtggaatctggtggaggacttgtgcaacctggaggatcactgagactgtcatgcgcggtgtccggttttgccctgagcaatcatgggatgtcgtgggtccggcgcgcccccggaaagggtctggaatgggtgtcgggtatcgtctactccgggagcacttactacgccgcgagcgtgaagggccgcttcaccatttcccgcgataactcccgcaacaccctgtacttgcaaatgaactcgctccggcctgaggacactgccatctactactgctccgcacacggaggagaatccgacgtgtggggccagggaactaccgtgaccgtcagcagcgcctccggcggcgggggctcaggcggacgggctagcggcggcggtggctccgagatcgtgctgacccagtcgcctggcactctctcgctgagccccggggaaagggcaaccctgtcctgtcgggccagccagtccattggatcatcctccctcgcctggtatcagcagaaaccgggacaggctccgcggctgcttatgtatggggccagctcaagagcctccggcattcccgaccggttctccgggtccggttccggcaccgatttcaccctgactatctcgaggctggagccagaggacttcgccgtgtactactgccagcagtacgcggggtccccgccgttcacgttcggacagggaaccaaggtcgagatcaagaccactaccccagcaccgaggccacccaccccggctcctaccatcgcctcccagcctctgtccctgcgtccggaggcatgtagacccgcagctggtggggccgtgcatacccggggtcttgacttcgcctgcgatatctacatttgggcccctctggctggtacttgcggggtcctgctgctttcactcgtgatcactctttactgtaagcgcggtcggaagaagctgctgtacatctttaagcaacccttcatgaggcctgtgcagactactcaagaggaggacggctgttcatgccggttcccagaggaggaggaaggcggctgcgaactgcgcgtgaaattcagccgcagcgcagatgctccagcctacaagcaggggcagaaccagctctacaacgaactcaatcttggtcggagagaggagtacgacgtgctggacaagcggagaggacgggacccagaaatgggcgggaagccgcgcagaaagaatccccaagagggcctgtacaacgagctccaaaaggataagatggcagaagcctatagcgagattggtatgaaaggggaacgcagaagaggcaaaggccacgacggactgtaccagggactcagcaccgccaccaaggacacctatgacgctcttcacatgcaggccctgccgcctcgg

SEQ ID NO: 879 - protein, 487 aa, synthetic construct
  REGION 1..487: note = source = /note="Description of Artificial Sequence: Synthetic polypeptide"
MALPVTALLLPLALLLHAARPQVQLQESGPGLVKPSETLSLTCTVSGGSISSSYYYWGWIRQPPGKGLEWIGSIYYSGSAYYNPSLKSRVTISVDTSKNQFSLRLSSVTAADTAVYYCARHWQEWPDAFDIWGQGTMVTVSSGGGGSGGGGSGGGGSETTLTQSPAFMSATPGDKVIISCKASQDIDDAMNWYQQKPGEAPLFIIQSATSPVPGIPPRFSGSGFGTDFSLTINNIESEDAAYYFCLQHDNFPLTFGQGTKLEIKTTTPAPRPPTPAPTIASQPLSLRPEACRPAAGGAVHTRGLDFACDIYIWAPLAGTCGVLLLSLVITLYCKRGRKKLLYIFKQPFMRPVQTTQEEDGCSCRFPEEEEGGCELRVKFSRSADAPAYKQGQNQLYNELNLGRREEYDVLDKRRGRDPEMGGKPRRKNPQEGLYNELQKDKMAEAYSEIGMKGERRRGKGHDGLYQGLSTATKDTYDALHMQALPPR

SEQ ID NO: 880 - protein, 489 aa, synthetic construct
  REGION 1..489: note = source = /note="Description of Artificial Sequence: Synthetic polypeptide"
MALPVTALLLPLALLLHAARPQVNLRESGPALVKPTQTLTLTCTFSGFSLRTSGMCVSWIRQPPGKALEWLARIDWDEDKFYSTSLKTRLTISKDTSDNQVVLRMTNMDPADTATYYCARSGAGGTSATAFDIWGPGTMVTVSSGGGGSGGGGSGGGGSDIQMTQSPSSLSASVGDRVTITCRASQDIYNNLAWFQLKPGSAPRSLMYAANKSQSGVPSRFSGSASGTDFTLTISSLQPEDFATYYCQHYYRFPYSFGQGTKLEIKTTTPAPRPPTPAPTIASQPLSLRPEACRPAAGGAVHTRGLDFACDIYIWAPLAGTCGVLLLSLVITLYCKRGRKKLLYIFKQPFMRPVQTTQEEDGCSCRFPEEEEGGCELRVKFSRSADAPAYKQGQNQLYNELNLGRREEYDVLDKRRGRDPEMGGKPRRKNPQEGLYNELQKDKMAEAYSEIGMKGERRRGKGHDGLYQGLSTATKDTYDALHMQALPPR

SEQ ID NO: 881 - protein, 490 aa, synthetic construct
  REGION 1..490: note = source = /note="Description of Artificial Sequence: Synthetic polypeptide"
MALPVTALLLPLALLLHAARPEVQLVESGGGLVKPGGSLRLSCAASGFTFSSYSMNWVRQAPGKGLEWVSSISSSSSYIYYADSVKGRFTISRDNAKNSLYLQMNSLRAEDTAVYYCAKTIAAVYAFDIWGQGTTVTVSSGGGGSGGGGSGGGGSEIVLTQSPLSLPVTPEEPASISCRSSQSLLHSNGYNYLDWYLQKPGQSPQLLIYLGSNRASGVPDRFSGSGSGTDFTLKISRVEAEDVGVYYCMQALQTPYTFGQGTKLEIKTTTPAPRPPTPAPTIASQPLSLRPEACRPAAGGAVHTRGLDFACDIYIWAPLAGTCGVLLLSLVITLYCKRGRKKLLYIFKQPFMRPVQTTQEEDGCSCRFPEEEEGGCELRVKFSRSADAPAYKQGQNQLYNELNLGRREEYDVLDKRRGRDPEMGGKPRRKNPQEGLYNELQKDKMAEAYSEIGMKGERRRGKGHDGLYQGLSTATKDTYDALHMQALPPR

SEQ ID NO: 882 - protein, 484 aa, synthetic construct
  REGION 1..484: note = source = /note="Description of Artificial Sequence: Synthetic polypeptide"
MALPVTALLLPLALLLHAARPEVQLVESGGGLVKPGGSLRLSCAASGFTFSDYYMSWIRQAPGKGLEWVSYISSSGSTIYYADSVKGRFTISRDNAKNSLYLQMNSLRAEDTAVYYCARDLRGAFDIWGQGTMVTVSSGGGGSGGGGSGGGGSSYVLTQSPSVSAAPGYTATISCGGNNIGTKSVHWYQQKPGQAPLLVIRDDSVRPSKIPGRFSGSNSGNMATLTISGVQAGDEADFYCQVWDSDSEHVVFGGGTKLTVLTTTPAPRPPTPAPTIASQPLSLRPEACRPAAGGAVHTRGLDFACDIYIWAPLAGTCGVLLLSLVITLYCKRGRKKLLYIFKQPFMRPVQTTQEEDGCSCRFPEEEEGGCELRVKFSRSADAPAYKQGQNQLYNELNLGRREEYDVLDKRRGRDPEMGGKPRRKNPQEGLYNELQKDKMAEAYSEIGMKGERRRGKGHDGLYQGLSTATKDTYDALHMQALPPR

SEQ ID NO: 883 - protein, 485 aa, synthetic construct
  REGION 1..485: note = source = /note="Description of Artificial Sequence: Synthetic polypeptide"
MALPVTALLLPLALLLHAARPQVQLVQSGAEVKKPGASVKVSCKPSGYTVTSHYIHWVRRAPGQGLEWMGMINPSGGVTAYSQTLQGRVTMTSDTSSSTVYMELSSLRSEDTAMYYCAREGSGSGWYFDFWGRGTLVTVSSGGGGSGGGGSGGGGSSYVLTQPPSVSVSPGQTASITCSGDGLSKKYVSWYQQKAGQSPVVLISRDKERPSGIPDRFSGSNSADTATLTISGTQAMDEADYYCQAWDDTTVVFGGGTKLTVLTTTPAPRPPTPAPTIASQPLSLRPEACRPAAGGAVHTRGLDFACDIYIWAPLAGTCGVLLLSLVITLYCKRGRKKLLYIFKQPFMRPVQTTQEEDGCSCRFPEEEEGGCELRVKFSRSADAPAYKQGQNQLYNELNLGRREEYDVLDKRRGRDPEMGGKPRRKNPQEGLYNELQKDKMAEAYSEIGMKGERRRGKGHDGLYQGLSTATKDTYDALHMQALPPR

SEQ ID NO: 884 - protein, 489 aa, synthetic construct
  REGION 1..489: note = source = /note="Description of Artificial Sequence: Synthetic polypeptide"
MALPVTALLLPLALLLHAARPQVQLQESGPGLVKPSQTLSLTCTVSGGSISSGGYYWSWIRQHPGKGLEWIGYIYYSGSTYYNPSLKSRVTISVDTSKNQFSLKLSSVTAADTAVYYCARAGIAARLRGAFDIWGQGTMVTVSSGGGGSGGGGSGGGGSDIVMTQSPSSVSASVGDRVIITCRASQGIRNWLAWYQQKPGKAPNLLIYAASNLQSGVPSRFSGSGSGADFTLTISSLQPEDVATYYCQKYNSAPFTFGPGTKVDIKTTTPAPRPPTPAPTIASQPLSLRPEACRPAAGGAVHTRGLDFACDIYIWAPLAGTCGVLLLSLVITLYCKRGRKKLLYIFKQPFMRPVQTTQEEDGCSCRFPEEEEGGCELRVKFSRSADAPAYKQGQNQLYNELNLGRREEYDVLDKRRGRDPEMGGKPRRKNPQEGLYNELQKDKMAEAYSEIGMKGERRRGKGHDGLYQGLSTATKDTYDALHMQALPPR

SEQ ID NO: 885 - protein, 497 aa, synthetic construct
  REGION 1..497: note = source = /note="Description of Artificial Sequence: Synthetic polypeptide"
MALPVTALLLPLALLLHAARPQVQLVQSGAEVKKPGSSVKVSCKASGGTFSSYAISWVRQAPGQGLEWMGGIIPIFGTANYAQKFQGRVTITADESTSTAYMELSSLRSEDTAVYYCARRGGYQLLRWDVGLLRSAFDIWGQGTMVTVSSGGGGSGGGGSGGGGSSYVLTQPPSVSVAPGQTARITCGGNNIGSKSVHWYQQKPGQAPVLVLYGKNNRPSGVPDRFSGSRSGTTASLTITGAQAEDEADYYCSSRDSSGDHLRVFGTGTKVTVLTTTPAPRPPTPAPTIASQPLSLRPEACRPAAGGAVHTRGLDFACDIYIWAPLAGTCGVLLLSLVITLYCKRGRKKLLYIFKQPFMRPVQTTQEEDGCSCRFPEEEEGGCELRVKFSRSADAPAYKQGQNQLYNELNLGRREEYDVLDKRRGRDPEMGGKPRRKNPQEGLYNELQKDKMAEAYSEIGMKGERRRGKGHDGLYQGLSTATKDTYDALHMQALPPR

SEQ ID NO: 886 - protein, 492 aa, synthetic construct
  REGION 1..492: note = source = /note="Description of Artificial Sequence: Synthetic polypeptide"
MALPVTALLLPLALLLHAARPEVQLQQSGPGLVKPSQTLSLTCAISGDSVSSNSAAWNWIRQSPSRGLEWLGRTYYRSKWYSFYAISLKSRIIINPDTSKNQFSLQLKSVTPEDTAVYYCARSSPEGLFLYWFDPWGQGTLVTVSSGGDGSGGGGSGGGGSSSELTQDPAVSVALGQTIRITCQGDSLGNYYATWYQQKPGQAPVLVIYGTNNRPSGIPDRFSASSSGNTASLTITGAQAEDEADYYCNSRDSSGHHLLFGTGTKVTVLTTTPAPRPPTPAPTIASQPLSLRPEACRPAAGGAVHTRGLDFACDIYIWAPLAGTCGVLLLSLVITLYCKRGRKKLLYIFKQPFMRPVQTTQEEDGCSCRFPEEEEGGCELRVKFSRSADAPAYKQGQNQLYNELNLGRREEYDVLDKRRGRDPEMGGKPRRKNPQEGLYNELQKDKMAEAYSEIGMKGERRRGKGHDGLYQGLSTATKDTYDALHMQALPPR

SEQ ID NO: 887 - protein, 490 aa, synthetic construct
  REGION 1..490: note = source = /note="Description of Artificial Sequence: Synthetic polypeptide"
MALPVTALLLPLALLLHAARPEVQLVESGGGLVQPGGSLRLSCAASGFTFSSYAMSWVRQAPGKGLEWVSAISGSGGSTYYADSVKGRFTISRDNSKNTLYLQMNSLRAEDTAVYYCAKVEGSGSLDYWGQGTLVTVSSGGGGSGGGGSGGGGSEIVMTQSPGTLSLSPGERATLSCRASQSVSSAYLAWYQQKPGQPPRLLISGASTRATGIPDRFGGSGSGTDFTLTISRLEPEDFAVYYCQHYGSSFNGSSLFTFGQGTRLEIKTTTPAPRPPTPAPTIASQPLSLRPEACRPAAGGAVHTRGLDFACDIYIWAPLAGTCGVLLLSLVITLYCKRGRKKLLYIFKQPFMRPVQTTQEEDGCSCRFPEEEEGGCELRVKFSRSADAPAYKQGQNQLYNELNLGRREEYDVLDKRRGRDPEMGGKPRRKNPQEGLYNELQKDKMAEAYSEIGMKGERRRGKGHDGLYQGLSTATKDTYDALHMQALPPR

SEQ ID NO: 888 - protein, 485 aa, synthetic construct
  REGION 1..485: note = source = /note="Description of Artificial Sequence: Synthetic polypeptide"
MALPVTALLLPLALLLHAARPEVQLVETGGGLVQPGGSLRLSCAASGITFSRYPMSWVRQAPGKGLEWVSGISDSGVSTYYADSAKGRFTISRDNSKNTLFLQMSSLRDEDTAVYYCVTRAGSEASDIWGQGTMVTVSSGGGGSGGGGSGGGGSEIVLTQSPATLSLSPGERATLSCRASQSVSNSLAWYQQKPGQAPRLLIYDASSRATGIPDRFSGSGSGTDFTLTISRLEPEDFAIYYCQQFGTSSGLTFGGGTKLEIKTTTPAPRPPTPAPTIASQPLSLRPEACRPAAGGAVHTRGLDFACDIYIWAPLAGTCGVLLLSLVITLYCKRGRKKLLYIFKQPFMRPVQTTQEEDGCSCRFPEEEEGGCELRVKFSRSADAPAYKQGQNQLYNELNLGRREEYDVLDKRRGRDPEMGGKPRRKNPQEGLYNELQKDKMAEAYSEIGMKGERRRGKGHDGLYQGLSTATKDTYDALHMQALPPR

SEQ ID NO: 889 - protein, 492 aa, synthetic construct
  REGION 1..492: note = source = /note="Description of Artificial Sequence: Synthetic polypeptide"
MALPVTALLLPLALLLHAARPQVQLVESGGGLVQPGGSLRLSCAASGFTFSSYAMSWVRQAPGKGLEWVSAISGSGGSTYYADSVKGRFTISRDNAKNSLYLQMNSLRAEDTAIYYCARATYKRELRYYYGMDVWGQGTMVTVSSGGGGSGGGGSGGGGSEIVMTQSPGTVSLSPGERATLSCRASQSVSSSFLAWYQQKPGQAPRLLIYGASSRATGIPDRFSGSGSGTDFTLTISRLEPEDSAVYYCQQYHSSPSWTFGQGTRLEIKTTTPAPRPPTPAPTIASQPLSLRPEACRPAAGGAVHTRGLDFACDIYIWAPLAGTCGVLLLSLVITLYCKRGRKKLLYIFKQPFMRPVQTTQEEDGCSCRFPEEEEGGCELRVKFSRSADAPAYKQGQNQLYNELNLGRREEYDVLDKRRGRDPEMGGKPRRKNPQEGLYNELQKDKMAEAYSEIGMKGERRRGKGHDGLYQGLSTATKDTYDALHMQALPPR

SEQ ID NO: 890 - protein, 492 aa, synthetic construct
  REGION 1..492: note = source = /note="Description of Artificial Sequence: Synthetic polypeptide"
MALPVTALLLPLALLLHAARPEVQLVETGGGLVQPGGSLRLSCAASGFTFSSYAMSWVRQAPGKGLEWVSAISGSGGSTYYADSVKGRFTISRDNSKNTLYLQMNTLKAEDTAVYYCARATYKRELRYYYGMDVWGQGTTVTVSSGGGGSGGGGSGGGGSEIVLTQSPSTLSLSPGESATLSCRASQSVSTTFLAWYQQKPGQAPRLLIYGSSNRATGIPDRFSGSGSGTDFTLTIRRLEPEDFAVYYCQQYHSSPSWTFGQGTKVEIKTTTPAPRPPTPAPTIASQPLSLRPEACRPAAGGAVHTRGLDFACDIYIWAPLAGTCGVLLLSLVITLYCKRGRKKLLYIFKQPFMRPVQTTQEEDGCSCRFPEEEEGGCELRVKFSRSADAPAYKQGQNQLYNELNLGRREEYDVLDKRRGRDPEMGGKPRRKNPQEGLYNELQKDKMAEAYSEIGMKGERRRGKGHDGLYQGLSTATKDTYDALHMQALPPR

SEQ ID NO: 891 - protein, 483 aa, synthetic construct
  REGION 1..483: note = source = /note="Description of Artificial Sequence: Synthetic polypeptide"
MALPVTALLLPLALLLHAARPEVQLVETGGGLVQPGRSLRLSCAASGFTFDDYAMHWVRQAPGKGLEWVSGISWNSGSIGYADSVKGRFTISRDNAKNSLYLQMNSLRDEDTAVYYCARVGKAVPDVWGQGTTVTVSSGGGGSGGGGSGGGGSDIVMTQTPSSLSASVGDRVTITCRASQSISSYLNWYQQKPGKAPKLLIYAASSLQSGVPSRFSGSGSGTDFTLTISSLQPEDFATYYCQQSYSTPYSFGQGTRLEIKTTTPAPRPPTPAPTIASQPLSLRPEACRPAAGGAVHTRGLDFACDIYIWAPLAGTCGVLLLSLVITLYCKRGRKKLLYIFKQPFMRPVQTTQEEDGCSCRFPEEEEGGCELRVKFSRSADAPAYKQGQNQLYNELNLGRREEYDVLDKRRGRDPEMGGKPRRKNPQEGLYNELQKDKMAEAYSEIGMKGERRRGKGHDGLYQGLSTATKDTYDALHMQALPPR

SEQ ID NO: 892 - protein, 490 aa, synthetic construct
  REGION 1..490: note = source = /note="Description of Artificial Sequence: Synthetic polypeptide"
MALPVTALLLPLALLLHAARPEVQLVESGGGLVQPGRSLRLSCTASGFTFDDYAMHWVRQRPGKGLEWVASINWKGNSLAYGDSVKGRFAISRDNAKNTVFLQMNSLRTEDTAVYYCASHQGVAYYNYAMDVWGRGTLVTVSSGGGGSGGGGSGGGGSEIVLTQSPGTLSLSPGERATLSCRATQSIGSSFLAWYQQRPGQAPRLLIYGASQRATGIPDRFSGRGSGTDFTLTISRVEPEDSAVYYCQHYESSPSWTFGQGTKVEIKTTTPAPRPPTPAPTIASQPLSLRPEACRPAAGGAVHTRGLDFACDIYIWAPLAGTCGVLLLSLVITLYCKRGRKKLLYIFKQPFMRPVQTTQEEDGCSCRFPEEEEGGCELRVKFSRSADAPAYKQGQNQLYNELNLGRREEYDVLDKRRGRDPEMGGKPRRKNPQEGLYNELQKDKMAEAYSEIGMKGERRRGKGHDGLYQGLSTATKDTYDALHMQALPPR

SEQ ID NO: 893 - protein, 485 aa, synthetic construct
  REGION 1..485: note = source = /note="Description of Artificial Sequence: Synthetic polypeptide"
MALPVTALLLPLALLLHAARPEVQLVESGGGLVQPGGSLRLSCAASGFTFSSYAMSWVRQAPGKGLEWVSAISGSGGSTYYADSVKGRFTISRDNSKNTLYLQMNSLRAEDTAVYYCAKVVRDGMDVWGQGTTVTVSSGGGGSGGGGSGGGGSEIVLTQSPATLSLSPGERATLSCRASQSVSSSYLAWYQQKPGQAPRLLIYGASSRATGIPDRFSGNGSGTDFTLTISRLEPEDFAVYYCQQYGSPPRFTFGPGTKVDIKTTTPAPRPPTPAPTIASQPLSLRPEACRPAAGGAVHTRGLDFACDIYIWAPLAGTCGVLLLSLVITLYCKRGRKKLLYIFKQPFMRPVQTTQEEDGCSCRFPEEEEGGCELRVKFSRSADAPAYKQGQNQLYNELNLGRREEYDVLDKRRGRDPEMGGKPRRKNPQEGLYNELQKDKMAEAYSEIGMKGERRRGKGHDGLYQGLSTATKDTYDALHMQALPPR

SEQ ID NO: 894 - protein, 486 aa, synthetic construct
  REGION 1..486: note = source = /note="Description of Artificial Sequence: Synthetic polypeptide"
MALPVTALLLPLALLLHAARPEVQLLESGGGLVQPGGSLRLSCAASGFTFSSYAMSWVRQAPGKGLEWVSAISGSGGSTYYADSVKGRFTISRDNSKNTLYLQMNSLRAEDTAVYYCAKIPQTGTFDYWGQGTLVTVSSGGGGSGGGGSGGGGSEIVLTQSPGTLSLSPGERATLSCRASQSVSSSYLAWYQQRPGQAPRLLIYGASSRATGIPDRFSGSGSGTDFTLTISRLEPEDFAVYYCQHYGSSPSWTFGQGTRLEIKTTTPAPRPPTPAPTIASQPLSLRPEACRPAAGGAVHTRGLDFACDIYIWAPLAGTCGVLLLSLVITLYCKRGRKKLLYIFKQPFMRPVQTTQEEDGCSCRFPEEEEGGCELRVKFSRSADAPAYKQGQNQLYNELNLGRREEYDVLDKRRGRDPEMGGKPRRKNPQEGLYNELQKDKMAEAYSEIGMKGERRRGKGHDGLYQGLSTATKDTYDALHMQALPPR

SEQ ID NO: 895 - protein, 492 aa, synthetic construct
  REGION 1..492: note = source = /note="Description of Artificial Sequence: Synthetic polypeptide"
MALPVTALLLPLALLLHAARPEVQLVETGGGLVQPGGSLRLSCAASGFTFSSYAMSWVRQAPGKGLEWVSAISGSGGSTYYADSVKGRFTMSRENDKNSVFLQMNSLRVEDTGVYYCARANYKRELRYYYGMDVWGQGTMVTVSSGGGGSGGGGSGGGGSEIVMTQSPGTLSLSPGESATLSCRASQRVASNYLAWYQHKPGQAPSLLISGASSRATGVPDRFSGSGSGTDFTLAISRLEPEDSAVYYCQHYDSSPSWTFGQGTKVEIKTTTPAPRPPTPAPTIASQPLSLRPEACRPAAGGAVHTRGLDFACDIYIWAPLAGTCGVLLLSLVITLYCKRGRKKLLYIFKQPFMRPVQTTQEEDGCSCRFPEEEEGGCELRVKFSRSADAPAYKQGQNQLYNELNLGRREEYDVLDKRRGRDPEMGGKPRRKNPQEGLYNELQKDKMAEAYSEIGMKGERRRGKGHDGLYQGLSTATKDTYDALHMQALPPR

SEQ ID NO: 896 - protein, 488 aa, synthetic construct
  REGION 1..488: note = source = /note="Description of Artificial Sequence: Synthetic polypeptide"
MALPVTALLLPLALLLHAARPEVQLLETGGGLVQPGGSLRLSCAASGFSFSSYAMSWVRQAPGKGLEWVSAISGSGGSTYYADSVKGRFTISRDNSKNTLYLQMNSLRAEDTAVYYCAKALVGATGAFDIWGQGTLVTVSSGGGGSGGGGSGGGGSEIVLTQSPGTLSLSPGERATLSCRASQSLSSNFLAWYQQKPGQAPGLLIYGASNWATGTPDRFSGSGSGTDFTLTITRLEPEDFAVYYCQYYGTSPMYTFGQGTKVEIKTTTPAPRPPTPAPTIASQPLSLRPEACRPAAGGAVHTRGLDFACDIYIWAPLAGTCGVLLLSLVITLYCKRGRKKLLYIFKQPFMRPVQTTQEEDGCSCRFPEEEEGGCELRVKFSRSADAPAYKQGQNQLYNELNLGRREEYDVLDKRRGRDPEMGGKPRRKNPQEGLYNELQKDKMAEAYSEIGMKGERRRGKGHDGLYQGLSTATKDTYDALHMQALPPR

SEQ ID NO: 897 - protein, 488 aa, synthetic construct
  REGION 1..488: note = source = /note="Description of Artificial Sequence: Synthetic polypeptide"
MALPVTALLLPLALLLHAARPEVQLLESGGGLVQPGGSLRLSCAASGFTFSSYAMSWVRQAPGKGLEWVSAISGSGGSTYYADSVKGRFTISRDNSKNTLYLQMNSLRAEDTAVYYCVLWFGEGFDPWGQGTLVTVSSGGGGSGGGGSGGGGSDIVLTQSPLSLPVTPGEPASISCRSSQSLLHSNGYNYLDWYLQKPGQSPQLLIYLGSNRASGVPDRFSGSGSGTDFTLKISRVEAEDVGVYYCMQALQTPLTFGGGTKVDIKTTTPAPRPPTPAPTIASQPLSLRPEACRPAAGGAVHTRGLDFACDIYIWAPLAGTCGVLLLSLVITLYCKRGRKKLLYIFKQPFMRPVQTTQEEDGCSCRFPEEEEGGCELRVKFSRSADAPAYKQGQNQLYNELNLGRREEYDVLDKRRGRDPEMGGKPRRKNPQEGLYNELQKDKMAEAYSEIGMKGERRRGKGHDGLYQGLSTATKDTYDALHMQALPPR

SEQ ID NO: 898 - protein, 495 aa, synthetic construct
  REGION 1..495: note = source = /note="Description of Artificial Sequence: Synthetic polypeptide"
MALPVTALLLPLALLLHAARPQVQLVESGGGLVQPGGSLRLSCAASGFTFSSYAMSWVRQAPGKGLEWVSAISGSGGSTYYADSVKGRFTISRDNSKNTLYLQMNSLRAEDTAVYYCAKVGYDSSGYYRDYYGMDVWGQGTTVTVSSGGGGSGGGGSGGGGSEIVLTQSPGTLSLSPGERATLSCRASQSVSSSYLAWYQQKPGQAPRLLIYGTSSRATGISDRFSGSGSGTDFTLTISRLEPEDFAVYYCQHYGNSPPKFTFGPGTKLEIKTTTPAPRPPTPAPTIASQPLSLRPEACRPAAGGAVHTRGLDFACDIYIWAPLAGTCGVLLLSLVITLYCKRGRKKLLYIFKQPFMRPVQTTQEEDGCSCRFPEEEEGGCELRVKFSRSADAPAYKQGQNQLYNELNLGRREEYDVLDKRRGRDPEMGGKPRRKNPQEGLYNELQKDKMAEAYSEIGMKGERRRGKGHDGLYQGLSTATKDTYDALHMQALPPR

SEQ ID NO: 899 - protein, 490 aa, synthetic construct
  REGION 1..490: note = source = /note="Description of Artificial Sequence: Synthetic polypeptide"
MALPVTALLLPLALLLHAARPEVQLVESGGGLVQPGGSLRLSCAASGFTFSSYAMSWVRQAPGKGLEWVSAISGSGGSTYYADSVKGRFTISRDNSKNTLYLQMNSLRAEDTAVYYCAKMGWSSGYLGAFDIWGQGTTVTVSSGGGGSGGGGSGGGGSEIVLTQSPGTLSLSPGERATLSCRASQSVASSFLAWYQQKPGQAPRLLIYGASGRATGIPDRFSGSGSGTDFTLTISRLEPEDFAVYYCQHYGGSPRLTFGGGTKVDIKTTTPAPRPPTPAPTIASQPLSLRPEACRPAAGGAVHTRGLDFACDIYIWAPLAGTCGVLLLSLVITLYCKRGRKKLLYIFKQPFMRPVQTTQEEDGCSCRFPEEEEGGCELRVKFSRSADAPAYKQGQNQLYNELNLGRREEYDVLDKRRGRDPEMGGKPRRKNPQEGLYNELQKDKMAEAYSEIGMKGERRRGKGHDGLYQGLSTATKDTYDALHMQALPPR

SEQ ID NO: 900 - skipped

SEQ ID NO: 901 - DNA, 1461 bp, synthetic construct
  misc_feature 1..1461: note = source = /note="Description of Artificial Sequence: Synthetic polynucleotide"
  source 1..1461: mol_type = other DNA
atggccctccctgtcaccgccctgctgcttccgctggctcttctgctccacgccgctcggccccaagtgcagcttcaggaaagcggaccgggcctggtcaagccatccgaaactctctccctgacttgcactgtgtctggcggttccatctcatcgtcgtactactactggggctggattaggcagccgcccggaaagggactggagtggatcggaagcatctactattccggctcggcgtactacaaccctagcctcaagtcgagagtgaccatctccgtggatacctccaagaaccagttttccctgcgcctgagctccgtgaccgccgctgacaccgccgtgtactactgtgctcggcattggcaggaatggcccgatgccttcgacatttggggccagggcactatggtcactgtgtcatccgggggtggaggcagcgggggaggagggtccggggggggaggttcagagacaaccttgacccagtcacccgcattcatgtccgccactccgggagacaaggtcatcatctcgtgcaaagcgtcccaggatatcgacgatgccatgaattggtaccagcagaagcctggcgaagcgccgctgttcattatccaatccgcaacctcgcccgtgcctggaatcccaccgcggttcagcggcagcggtttcggaaccgacttttccctgaccattaacaacattgagtccgaggacgccgcctactacttctgcctgcaacacgacaacttccctctcacgttcggccagggaaccaagctggaaatcaagaccactaccccagcaccgaggccacccaccccggctcctaccatcgcctcccagcctctgtccctgcgtccggaggcatgtagacccgcagctggtggggccgtgcatacccggggtcttgacttcgcctgcgatatctacatttgggcccctctggctggtacttgcggggtcctgctgctttcactcgtgatcactctttactgtaagcgcggtcggaagaagctgctgtacatctttaagcaacccttcatgaggcctgtgcagactactcaagaggaggacggctgttcatgccggttcccagaggaggaggaaggcggctgcgaactgcgcgtgaaattcagccgcagcgcagatgctccagcctacaagcaggggcagaaccagctctacaacgaactcaatcttggtcggagagaggagtacgacgtgctggacaagcggagaggacgggacccagaaatgggcgggaagccgcgcagaaagaatccccaagagggcctgtacaacgagctccaaaaggataagatggcagaagcctatagcgagattggtatgaaaggggaacgcagaagaggcaaaggccacgacggactgtaccagggactcagcaccgccaccaaggacacctatgacgctcttcacatgcaggccctgccgcctcgg

SEQ ID NO: 902 - DNA, 1467 bp, synthetic construct
  misc_feature 1..1467: note = source = /note="Description of Artificial Sequence: Synthetic polynucleotide"
  source 1..1467: mol_type = other DNA
atggccctccctgtcaccgccctgctgcttccgctggctcttctgctccacgccgctcggccccaagtcaatctgcgcgaatccggccccgccttggtcaagcctacccagaccctcactctgacctgtactttctccggcttctccctgcggacttccgggatgtgcgtgtcctggatcagacagcctccgggaaaggccctggagtggctcgctcgcattgactgggatgaggacaagttctactccacctcactcaagaccaggctgaccatcagcaaagatacctctgacaaccaagtggtgctccgcatgaccaacatggacccagccgacactgccacttactactgcgcgaggagcggagcgggcggaacctccgccaccgccttcgatatttggggcccgggtaccatggtcaccgtgtcaagcggaggaggggggtccgggggcggcggttccgggggaggcggatcggacattcagatgactcagtcaccatcgtccctgagcgctagcgtgggcgacagagtgacaatcacttgccgggcatcccaggacatctataacaaccttgcgtggttccagctgaagcctggttccgcaccgcggtcacttatgtacgccgccaacaagagccagtcgggagtgccgtcccggttttccggttcggcctcgggaactgacttcaccctgacgatctccagcctgcaacccgaggatttcgccacctactactgccagcactactaccgctttccctactcgttcggacagggaaccaagctggaaatcaagaccactaccccagcaccgaggccacccaccccggctcctaccatcgcctcccagcctctgtccctgcgtccggaggcatgtagacccgcagctggtggggccgtgcatacccggggtcttgacttcgcctgcgatatctacatttgggcccctctggctggtacttgcggggtcctgctgctttcactcgtgatcactctttactgtaagcgcggtcggaagaagctgctgtacatctttaagcaacccttcatgaggcctgtgcagactactcaagaggaggacggctgttcatgccggttcccagaggaggaggaaggcggctgcgaactgcgcgtgaaattcagccgcagcgcagatgctccagcctacaagcaggggcagaaccagctctacaacgaactcaatcttggtcggagagaggagtacgacgtgctggacaagcggagaggacgggacccagaaatgggcgggaagccgcgcagaaagaatccccaagagggcctgtacaacgagctccaaaaggataagatggcagaagcctatagcgagattggtatgaaaggggaacgcagaagaggcaaaggccacgacggactgtaccagggactcagcaccgccaccaaggacacctatgacgctcttcacatgcaggccctgccgcctcgg

SEQ ID NO: 903 - DNA, 1470 bp, synthetic construct
  misc_feature 1..1470: note = source = /note="Description of Artificial Sequence: Synthetic polynucleotide"
  source 1..1470: mol_type = other DNA
atggccctccctgtcaccgccctgctgcttccgctggctcttctgctccacgccgctcggcccgaagtgcagcttgtcgaatccggggggggactggtcaagccgggcggatcactgagactgtcctgcgccgcgagcggcttcacgttctcctcctactccatgaactgggtccgccaagcccccgggaagggactggaatgggtgtcctctatctcctcgtcgtcgtcctacatctactacgccgactccgtgaagggaagattcaccatttcccgcgacaacgcaaagaactcactgtacttgcaaatgaactcactccgggccgaagatactgctgtgtactattgcgccaagactattgccgccgtctacgctttcgacatctggggccagggaaccaccgtgactgtgtcgtccggtggtggtggctcgggcggaggaggaagcggcggcggggggtccgagattgtgctgacccagtcgccactgagcctccctgtgacccccgaggaacccgccagcatcagctgccggtccagccagtccctgctccactccaacggatacaattacctcgattggtaccttcagaagcctggacaaagcccgcagctgctcatctacttgggatcaaaccgcgcgtcaggagtgcctgaccggttctccggctcgggcagcggtaccgatttcaccctgaaaatctccagggtggaggcagaggacgtgggagtgtattactgtatgcaggcgctgcagactccgtacacatttgggcagggcaccaagctggagatcaagaccactaccccagcaccgaggccacccaccccggctcctaccatcgcctcccagcctctgtccctgcgtccggaggcatgtagacccgcagctggtggggccgtgcatacccggggtcttgacttcgcctgcgatatctacatttgggcccctctggctggtacttgcggggtcctgctgctttcactcgtgatcactctttactgtaagcgcggtcggaagaagctgctgtacatctttaagcaacccttcatgaggcctgtgcagactactcaagaggaggacggctgttcatgccggttcccagaggaggaggaaggcggctgcgaactgcgcgtgaaattcagccgcagcgcagatgctccagcctacaagcaggggcagaaccagctctacaacgaactcaatcttggtcggagagaggagtacgacgtgctggacaagcggagaggacgggacccagaaatgggcgggaagccgcgcagaaagaatccccaagagggcctgtacaacgagctccaaaaggataagatggcagaagcctatagcgagattggtatgaaaggggaacgcagaagaggcaaaggccacgacggactgtaccagggactcagcaccgccaccaaggacacctatgacgctcttcacatgcaggccctgccgcctcgg

SEQ ID NO: 904 - DNA, 1452 bp, synthetic construct
  misc_feature 1..1452: note = source = /note="Description of Artificial Sequence: Synthetic polynucleotide"
  source 1..1452: mol_type = other DNA
atggccctccctgtcaccgccctgctgcttccgctggctcttctgctccacgccgctcggcccgaagtccagctcgtggagtccggcggaggccttgtgaagcctggaggttcgctgagactgtcctgcgccgcctccggcttcaccttctccgactactacatgtcctggatcagacaggccccgggaaagggcctggaatgggtgtcctacatctcgtcatcgggcagcactatctactacgcggactcagtgaaggggcggttcaccatttcccgggataacgcgaagaactcgctgtatctgcaaatgaactcactgagggccgaggacaccgccgtgtactactgcgcccgcgatctccgcggggcatttgacatctggggacagggaaccatggtcacagtgtccagcggagggggaggatcgggtggcggaggttccgggggtggaggctcctcctacgtgctgactcagagcccaagcgtcagcgctgcgcccggttacacggcaaccatctcctgtggcggaaacaacattgggaccaagtctgtgcactggtatcagcagaagccgggccaagctcccctgttggtgatccgcgatgactccgtgcggcctagcaaaattccgggacggttctccggctccaacagcggcaatatggccactctcaccatctcgggagtgcaggccggagatgaagccgacttctactgccaagtctgggactcagactccgagcatgtggtgttcgggggcggaaccaagctgactgtgctcaccactaccccagcaccgaggccacccaccccggctcctaccatcgcctcccagcctctgtccctgcgtccggaggcatgtagacccgcagctggtggggccgtgcatacccggggtcttgacttcgcctgcgatatctacatttgggcccctctggctggtacttgcggggtcctgctgctttcactcgtgatcactctttactgtaagcgcggtcggaagaagctgctgtacatctttaagcaacccttcatgaggcctgtgcagactactcaagaggaggacggctgttcatgccggttcccagaggaggaggaaggcggctgcgaactgcgcgtgaaattcagccgcagcgcagatgctccagcctacaagcaggggcagaaccagctctacaacgaactcaatcttggtcggagagaggagtacgacgtgctggacaagcggagaggacgggacccagaaatgggcgggaagccgcgcagaaagaatccccaagagggcctgtacaacgagctccaaaaggataagatggcagaagcctatagcgagattggtatgaaaggggaacgcagaagaggcaaaggccacgacggactgtaccagggactcagcaccgccaccaaggacacctatgacgctcttcacatgcaggccctgccgcctcgg

SEQ ID NO: 905 - DNA, 1455 bp, synthetic construct
  misc_feature 1..1455: note = source = /note="Description of Artificial Sequence: Synthetic polynucleotide"
  source 1..1455: mol_type = other DNA
atggccctccctgtcaccgccctgctgcttccgctggctcttctgctccacgccgctcggccccaagtgcagctggtgcagagcggggccgaagtcaagaagccgggagcctccgtgaaagtgtcctgcaagccttcgggatacaccgtgacctcccactacattcattgggtccgccgcgcccccggccaaggactcgagtggatgggcatgatcaaccctagcggcggagtgaccgcgtacagccagacgctgcagggacgcgtgactatgacctcggatacctcctcctccaccgtctatatggaactgtccagcctgcggtccgaggataccgccatgtactactgcgcccgggaaggatcaggctccgggtggtatttcgacttctggggaagaggcaccctcgtgactgtgtcatctgggggagggggttccggtggtggcggatcgggaggaggcggttcatcctacgtgctgacccagccaccctccgtgtccgtgagccccggccagactgcatcgattacatgtagcggcgacggcctctccaagaaatacgtgtcgtggtaccagcagaaggccggacagagcccggtggtgctgatctcaagagataaggagcggcctagcggaatcccggacaggttctcgggttccaactccgcggacactgctactctgaccatctcggggacccaggctatggacgaagccgattactactgccaagcctgggacgacactactgtcgtgtttggagggggcaccaagttgaccgtccttaccactaccccagcaccgaggccacccaccccggctcctaccatcgcctcccagcctctgtccctgcgtccggaggcatgtagacccgcagctggtggggccgtgcatacccggggtcttgacttcgcctgcgatatctacatttgggcccctctggctggtacttgcggggtcctgctgctttcactcgtgatcactctttactgtaagcgcggtcggaagaagctgctgtacatctttaagcaacccttcatgaggcctgtgcagactactcaagaggaggacggctgttcatgccggttcccagaggaggaggaaggcggctgcgaactgcgcgtgaaattcagccgcagcgcagatgctccagcctacaagcaggggcagaaccagctctacaacgaactcaatcttggtcggagagaggagtacgacgtgctggacaagcggagaggacgggacccagaaatgggcgggaagccgcgcagaaagaatccccaagagggcctgtacaacgagctccaaaaggataagatggcagaagcctatagcgagattggtatgaaaggggaacgcagaagaggcaaaggccacgacggactgtaccagggactcagcaccgccaccaaggacacctatgacgctcttcacatgcaggccctgccgcctcgg

SEQ ID NO: 906 - DNA, 1467 bp, synthetic construct
  misc_feature 1..1467: note = source = /note="Description of Artificial Sequence: Synthetic polynucleotide"
  source 1..1467: mol_type = other DNA
atggccctccctgtcaccgccctgctgcttccgctggctcttctgctccacgccgctcggccccaagtgcagcttcaggagagcggcccgggactcgtgaagccgtcccagaccctgtccctgacttgcaccgtgtcgggaggaagcatctcgagcggaggctactattggtcgtggattcggcagcaccctggaaagggcctggaatggatcggctacatctactactccggctcgacctactacaacccatcgctgaagtccagagtgacaatctcagtggacacgtccaagaatcagttcagcctgaagctctcttccgtgactgcggccgacaccgccgtgtactactgcgcacgcgctggaattgccgcccggctgaggggtgccttcgacatttggggacagggcaccatggtcaccgtgtcctccggcggcggaggttccgggggtggaggctcaggaggaggggggtccgacatcgtcatgactcagtcgccctcaagcgtcagcgcgtccgtcggggacagagtgatcatcacctgtcgggcgtcccagggaattcgcaactggctggcctggtatcagcagaagcccggaaaggcccccaacctgttgatctacgccgcctcaaacctccaatccggggtgccgagccgcttcagcggctccggttcgggtgccgatttcactctgaccatctcctccctgcaacctgaagatgtggctacctactactgccaaaagtacaactccgcaccttttactttcggaccggggaccaaagtggacattaagaccactaccccagcaccgaggccacccaccccggctcctaccatcgcctcccagcctctgtccctgcgtccggaggcatgtagacccgcagctggtggggccgtgcatacccggggtcttgacttcgcctgcgatatctacatttgggcccctctggctggtacttgcggggtcctgctgctttcactcgtgatcactctttactgtaagcgcggtcggaagaagctgctgtacatctttaagcaacccttcatgaggcctgtgcagactactcaagaggaggacggctgttcatgccggttcccagaggaggaggaaggcggctgcgaactgcgcgtgaaattcagccgcagcgcagatgctccagcctacaagcaggggcagaaccagctctacaacgaactcaatcttggtcggagagaggagtacgacgtgctggacaagcggagaggacgggacccagaaatgggcgggaagccgcgcagaaagaatccccaagagggcctgtacaacgagctccaaaaggataagatggcagaagcctatagcgagattggtatgaaaggggaacgcagaagaggcaaaggccacgacggactgtaccagggactcagcaccgccaccaaggacacctatgacgctcttcacatgcaggccctgccgcctcgg

SEQ ID NO: 907 - DNA, 1491 bp, synthetic construct
  misc_feature 1..1491: note = source = /note="Description of Artificial Sequence: Synthetic polynucleotide"
  source 1..1491: mol_type = other DNA
atggccctccctgtcaccgccctgctgcttccgctggctcttctgctccacgccgctcggccccaagtgcagctggtccagtcgggcgccgaggtcaagaagcccgggagctctgtgaaagtgtcctgcaaggcctccgggggcacctttagctcctacgccatctcctgggtccgccaagcaccgggtcaaggcctggagtggatggggggaattatccctatcttcggcactgccaactacgcccagaagttccagggacgcgtgaccattaccgcggacgaatccacctccaccgcttatatggagctgtccagcttgcgctcggaagataccgccgtgtactactgcgcccggaggggtggataccagctgctgagatgggacgtgggcctcctgcggtcggcgttcgacatctggggccagggcactatggtcactgtgtccagcggaggaggcggatcgggaggcggcggatcagggggaggcggttccagctacgtgcttactcaacccccttcggtgtccgtggccccgggacagaccgccagaatcacttgcggaggaaacaacattgggtccaagagcgtgcattggtaccagcagaagccaggacaggcccctgtgctggtgctctacgggaagaacaatcggcccagcggagtgccggacaggttctcgggttcacgctccggtacaaccgcttcactgactatcaccggggcccaggcagaggatgaagcggactactactgttcctcccgggattcatccggcgaccacctccgggtgttcggaaccggaacgaaggtcaccgtgctgaccactaccccagcaccgaggccacccaccccggctcctaccatcgcctcccagcctctgtccctgcgtccggaggcatgtagacccgcagctggtggggccgtgcatacccggggtcttgacttcgcctgcgatatctacatttgggcccctctggctggtacttgcggggtcctgctgctttcactcgtgatcactctttactgtaagcgcggtcggaagaagctgctgtacatctttaagcaacccttcatgaggcctgtgcagactactcaagaggaggacggctgttcatgccggttcccagaggaggaggaaggcggctgcgaactgcgcgtgaaattcagccgcagcgcagatgctccagcctacaagcaggggcagaaccagctctacaacgaactcaatcttggtcggagagaggagtacgacgtgctggacaagcggagaggacgggacccagaaatgggcgggaagccgcgcagaaagaatccccaagagggcctgtacaacgagctccaaaaggataagatggcagaagcctatagcgagattggtatgaaaggggaacgcagaagaggcaaaggccacgacggactgtaccagggactcagcaccgccaccaaggacacctatgacgctcttcacatgcaggccctgccgcctcgg

SEQ ID NO: 908 - DNA, 1476 bp, synthetic construct
  misc_feature 1..1476: note = source = /note="Description of Artificial Sequence: Synthetic polynucleotide"
  source 1..1476: mol_type = other DNA
atggccctccctgtcaccgccctgctgcttccgctggctcttctgctccacgccgctcggcccgaagtgcagctccaacagtcaggaccggggctcgtgaagccatcccagaccctgtccctgacttgtgccatctcgggagatagcgtgtcatcgaactccgccgcctggaactggattcggcagagcccgtcccgcggactggagtggcttggaaggacctactaccggtccaagtggtactctttctacgcgatctcgctgaagtcccgcattatcattaaccctgatacctccaagaatcagttctccctccaactgaaatccgtcacccccgaggacacagcagtgtattactgcgcacggagcagccccgaaggactgttcctgtattggtttgacccctggggccaggggactcttgtgaccgtgtcgagcggcggagatgggtccggtggcggtggttcggggggcggcggatcatcatccgaactgacccaggacccggctgtgtccgtggcgctgggacaaaccatccgcattacgtgccagggagactccctgggcaactactacgccacttggtaccagcagaagccgggccaagcccctgtgttggtcatctacgggaccaacaacagaccttccggcatccccgaccggttcagcgcttcgtcctccggcaacactgccagcctgaccatcactggagcgcaggccgaagatgaggccgactactactgcaacagcagagactcctcgggtcatcacctcttgttcggaactggaaccaaggtcaccgtgctgaccactaccccagcaccgaggccacccaccccggctcctaccatcgcctcccagcctctgtccctgcgtccggaggcatgtagacccgcagctggtggggccgtgcatacccggggtcttgacttcgcctgcgatatctacatttgggcccctctggctggtacttgcggggtcctgctgctttcactcgtgatcactctttactgtaagcgcggtcggaagaagctgctgtacatctttaagcaacccttcatgaggcctgtgcagactactcaagaggaggacggctgttcatgccggttcccagaggaggaggaaggcggctgcgaactgcgcgtgaaattcagccgcagcgcagatgctccagcctacaagcaggggcagaaccagctctacaacgaactcaatcttggtcggagagaggagtacgacgtgctggacaagcggagaggacgggacccagaaatgggcgggaagccgcgcagaaagaatccccaagagggcctgtacaacgagctccaaaaggataagatggcagaagcctatagcgagattggtatgaaaggggaacgcagaagaggcaaaggccacgacggactgtaccagggactcagcaccgccaccaaggacacctatgacgctcttcacatgcaggccctgccgcctcgg

SEQ ID NO: 909 - DNA, 1470 bp, synthetic construct
  misc_feature 1..1470: note = source = /note="Description of Artificial Sequence: Synthetic polynucleotide"
  source 1..1470: mol_type = other DNA
atggccctccctgtcaccgccctgctgcttccgctggctcttctgctccacgccgctcggcccgaagtgcagctcgtggagtcaggaggcggcctggtccagccgggagggtcccttagactgtcatgcgccgcaagcggattcactttctcctcctatgccatgagctgggtccgccaagcccccggaaagggactggaatgggtgtccgccatctcggggtctggaggctcaacttactacgctgactccgtgaagggacggttcaccattagccgcgacaactccaagaacaccctctacctccaaatgaactccctgcgggccgaggataccgccgtctactactgcgccaaagtggaaggttcaggatcgctggactactggggacagggtactctcgtgaccgtgtcatcgggcggaggaggttccggcggtggcggctccggcggcggagggtcggagatcgtgatgacccagagccctggtactctgagcctttcgccgggagaaagggccaccctgtcctgccgcgcttcccaatccgtgtcctccgcgtacttggcgtggtaccagcagaagccgggacagccccctcggctgctgatcagcggggccagcacccgggcaaccggaatcccagacagattcgggggttccggcagcggcacagatttcaccctgactatttcgaggttggagcccgaggactttgcggtgtattactgtcagcactacgggtcgtcctttaatggctccagcctgttcacgttcggacaggggacccgcctggaaatcaagaccactaccccagcaccgaggccacccaccccggctcctaccatcgcctcccagcctctgtccctgcgtccggaggcatgtagacccgcagctggtggggccgtgcatacccggggtcttgacttcgcctgcgatatctacatttgggcccctctggctggtacttgcggggtcctgctgctttcactcgtgatcactctttactgtaagcgcggtcggaagaagctgctgtacatctttaagcaacccttcatgaggcctgtgcagactactcaagaggaggacggctgttcatgccggttcccagaggaggaggaaggcggctgcgaactgcgcgtgaaattcagccgcagcgcagatgctccagcctacaagcaggggcagaaccagctctacaacgaactcaatcttggtcggagagaggagtacgacgtgctggacaagcggagaggacgggacccagaaatgggcgggaagccgcgcagaaagaatccccaagagggcctgtacaacgagctccaaaaggataagatggcagaagcctatagcgagattggtatgaaaggggaacgcagaagaggcaaaggccacgacggactgtaccagggactcagcaccgccaccaaggacacctatgacgctcttcacatgcaggccctgccgcctcgg

SEQ ID NO: 910 - DNA, 1455 bp, synthetic construct
  misc_feature 1..1455: note = source = /note="Description of Artificial Sequence: Synthetic polynucleotide"
  source 1..1455: mol_type = other DNA
atggccctccctgtcaccgccctgctgcttccgctggctcttctgctccacgccgctcggcccgaagtgcaactggtggaaaccggtggcggcctggtgcagcctggaggatcattgaggctgtcatgcgcggccagcggtattaccttctcccggtaccccatgtcctgggtcagacaggccccggggaaagggcttgaatgggtgtccgggatctcggactccggtgtcagcacttactacgccgactccgccaagggacgcttcaccatttcccgggacaactcgaagaacaccctgttcctccaaatgagctccctccgggacgaggatactgcagtgtactactgcgtgacccgcgccgggtccgaggcgtctgacatttggggacagggcactatggtcaccgtgtcgtccggcggagggggctcgggaggcggtggcagcggaggaggagggtccgagatcgtgctgacccaatccccggccaccctctcgctgagccctggagaaagggcaaccttgtcctgtcgcgcgagccagtccgtgagcaactccctggcctggtaccagcagaagcccggacaggctccgagacttctgatctacgacgcttcgagccgggccactggaatccccgaccgcttttcggggtccggctcaggaaccgatttcaccctgacaatctcacggctggagccagaggatttcgccatctattactgccagcagttcggtacttcctccggcctgactttcggaggcggcacgaagctcgaaatcaagaccactaccccagcaccgaggccacccaccccggctcctaccatcgcctcccagcctctgtccctgcgtccggaggcatgtagacccgcagctggtggggccgtgcatacccggggtcttgacttcgcctgcgatatctacatttgggcccctctggctggtacttgcggggtcctgctgctttcactcgtgatcactctttactgtaagcgcggtcggaagaagctgctgtacatctttaagcaacccttcatgaggcctgtgcagactactcaagaggaggacggctgttcatgccggttcccagaggaggaggaaggcggctgcgaactgcgcgtgaaattcagccgcagcgcagatgctccagcctacaagcaggggcagaaccagctctacaacgaactcaatcttggtcggagagaggagtacgacgtgctggacaagcggagaggacgggacccagaaatgggcgggaagccgcgcagaaagaatccccaagagggcctgtacaacgagctccaaaaggataagatggcagaagcctatagcgagattggtatgaaaggggaacgcagaagaggcaaaggccacgacggactgtaccagggactcagcaccgccaccaaggacacctatgacgctcttcacatgcaggccctgccgcctcgg

SEQ ID NO: 911 - DNA, 1476 bp, synthetic construct
  misc_feature 1..1476: note = source = /note="Description of Artificial Sequence: Synthetic polynucleotide"
  source 1..1476: mol_type = other DNA
atggccctccctgtcaccgccctgctgcttccgctggctcttctgctccacgccgctcggccccaagtgcagctcgtggaatcgggtggcggactggtgcagccggggggctcacttagactgtcctgcgcggccagcggattcactttctcctcctacgccatgtcctgggtcagacaggcccctggaaagggcctggaatgggtgtccgcaatcagcggcagcggcggctcgacctattacgcggattcagtgaagggcagattcaccatttcccgggacaacgccaagaactccttgtaccttcaaatgaactccctccgcgcggaagataccgcaatctactactgcgctcgggccacttacaagagggaactgcgctactactacgggatggacgtctggggccagggaaccatggtcaccgtgtccagcggaggaggaggatcgggaggaggcggtagcgggggtggagggtcggagatcgtgatgacccagtcccccggcactgtgtcgctgtcccccggcgaacgggccaccctgtcatgtcgggccagccagtcagtgtcgtcaagcttcctcgcctggtaccagcagaaaccgggacaagctccccgcctgctgatctacggagccagcagccgggccaccggtattcctgaccggttctccggttcggggtccgggaccgactttactctgactatctctcgcctcgagccagaggactccgccgtgtattactgccagcagtaccactcctccccgtcctggacgttcggacagggcacaaggctggagattaagaccactaccccagcaccgaggccacccaccccggctcctaccatcgcctcccagcctctgtccctgcgtccggaggcatgtagacccgcagctggtggggccgtgcatacccggggtcttgacttcgcctgcgatatctacatttgggcccctctggctggtacttgcggggtcctgctgctttcactcgtgatcactctttactgtaagcgcggtcggaagaagctgctgtacatctttaagcaacccttcatgaggcctgtgcagactactcaagaggaggacggctgttcatgccggttcccagaggaggaggaaggcggctgcgaactgcgcgtgaaattcagccgcagcgcagatgctccagcctacaagcaggggcagaaccagctctacaacgaactcaatcttggtcggagagaggagtacgacgtgctggacaagcggagaggacgggacccagaaatgggcgggaagccgcgcagaaagaatccccaagagggcctgtacaacgagctccaaaaggataagatggcagaagcctatagcgagattggtatgaaaggggaacgcagaagaggcaaaggccacgacggactgtaccagggactcagcaccgccaccaaggacacctatgacgctcttcacatgcaggccctgccgcctcgg

SEQ ID NO: 912 - DNA, 1476 bp, synthetic construct
  misc_feature 1..1476: note = source = /note="Description of Artificial Sequence: Synthetic polynucleotide"
  source 1..1476: mol_type = other DNA
atggccctccctgtcaccgccctgctgcttccgctggctcttctgctccacgccgctcggcccgaggtgcagcttgtggaaaccggtggcggactggtgcagcccggaggaagcctcaggctgtcctgcgccgcgtccggcttcaccttctcctcgtacgccatgtcctgggtccgccaggcccccggaaagggcctggaatgggtgtccgccatctctggaagcggaggttccacgtactacgcggacagcgtcaagggaaggttcacaatctcccgcgataattcgaagaacactctgtaccttcaaatgaacaccctgaaggccgaggacactgctgtgtactactgcgcacgggccacctacaagagagagctccggtactactacggaatggacgtctggggccagggaactactgtgaccgtgtcctcgggagggggtggctccggggggggcggctccggcggaggcggttccgagattgtgctgacccagtcaccttcaactctgtcgctgtccccgggagagagcgctactctgagctgccgggccagccagtccgtgtccaccaccttcctcgcctggtatcagcagaagccggggcaggcaccacggctcttgatctacgggtcaagcaacagagcgaccggaattcctgaccgcttctcggggagcggttcaggcaccgacttcaccctgactatccggcgcctggaacccgaagatttcgccgtgtattactgtcaacagtaccactcctcgccgtcctggacctttggccaaggaaccaaagtggaaatcaagaccactaccccagcaccgaggccacccaccccggctcctaccatcgcctcccagcctctgtccctgcgtccggaggcatgtagacccgcagctggtggggccgtgcatacccggggtcttgacttcgcctgcgatatctacatttgggcccctctggctggtacttgcggggtcctgctgctttcactcgtgatcactctttactgtaagcgcggtcggaagaagctgctgtacatctttaagcaacccttcatgaggcctgtgcagactactcaagaggaggacggctgttcatgccggttcccagaggaggaggaaggcggctgcgaactgcgcgtgaaattcagccgcagcgcagatgctccagcctacaagcaggggcagaaccagctctacaacgaactcaatcttggtcggagagaggagtacgacgtgctggacaagcggagaggacgggacccagaaatgggcgggaagccgcgcagaaagaatccccaagagggcctgtacaacgagctccaaaaggataagatggcagaagcctatagcgagattggtatgaaaggggaacgcagaagaggcaaaggccacgacggactgtaccagggactcagcaccgccaccaaggacacctatgacgctcttcacatgcaggccctgccgcctcgg

SEQ ID NO: 913 - DNA, 1449 bp, synthetic construct
  misc_feature 1..1449: note = source = /note="Description of Artificial Sequence: Synthetic polynucleotide"
  source 1..1449: mol_type = other DNA
atggccctccctgtcaccgccctgctgcttccgctggctcttctgctccacgccgctcggcccgaagtgcagctcgtggaaactggaggtggactcgtgcagcctggacggtcgctgcggctgagctgcgctgcatccggcttcaccttcgacgattatgccatgcactgggtcagacaggcgccagggaagggacttgagtgggtgtccggtatcagctggaatagcggctcaatcggatacgcggactccgtgaagggaaggttcaccatttcccgcgacaacgccaagaactccctgtacttgcaaatgaacagcctccgggatgaggacactgccgtgtactactgcgcccgcgtcggaaaagctgtgcccgacgtctggggccagggaaccactgtgaccgtgtccagcggcgggggtggatcgggcggtggagggtccggtggagggggctcagatattgtgatgacccagaccccctcgtccctgtccgcctcggtcggcgaccgcgtgactatcacatgtagagcctcgcagagcatctccagctacctgaactggtatcagcagaagccggggaaggccccgaagctcctgatctacgcggcatcatcactgcaatcgggagtgccgagccggttttccgggtccggctccggcaccgacttcacgctgaccatttcttccctgcaacccgaggacttcgccacttactactgccagcagtcctactccaccccttactccttcggccaaggaaccaggctggaaatcaagaccactaccccagcaccgaggccacccaccccggctcctaccatcgcctcccagcctctgtccctgcgtccggaggcatgtagacccgcagctggtggggccgtgcatacccggggtcttgacttcgcctgcgatatctacatttgggcccctctggctggtacttgcggggtcctgctgctttcactcgtgatcactctttactgtaagcgcggtcggaagaagctgctgtacatctttaagcaacccttcatgaggcctgtgcagactactcaagaggaggacggctgttcatgccggttcccagaggaggaggaaggcggctgcgaactgcgcgtgaaattcagccgcagcgcagatgctccagcctacaagcaggggcagaaccagctctacaacgaactcaatcttggtcggagagaggagtacgacgtgctggacaagcggagaggacgggacccagaaatgggcgggaagccgcgcagaaagaatccccaagagggcctgtacaacgagctccaaaaggataagatggcagaagcctatagcgagattggtatgaaaggggaacgcagaagaggcaaaggccacgacggactgtaccagggactcagcaccgccaccaaggacacctatgacgctcttcacatgcaggccctgccgcctcgg

SEQ ID NO: 914 - DNA, 1470 bp, synthetic construct
  misc_feature 1..1470: note = source = /note="Description of Artificial Sequence: Synthetic polynucleotide"
  source 1..1470: mol_type = other DNA
atggccctccctgtcaccgccctgctgcttccgctggctcttctgctccacgccgctcggcccgaagtgcagctcgtggagagcgggggaggattggtgcagcccggaaggtccctgcggctctcctgcactgcgtctggcttcaccttcgacgactacgcgatgcactgggtcagacagcgcccgggaaagggcctggaatgggtcgcctcaatcaactggaagggaaactccctggcctatggcgacagcgtgaagggccgcttcgccatttcgcgcgacaacgccaagaacaccgtgtttctgcaaatgaattccctgcggaccgaggataccgctgtgtactactgcgccagccaccagggcgtggcatactataactacgccatggacgtgtggggaagagggacgctcgtcaccgtgtcctccgggggcggtggatcgggtggaggaggaagcggtggcgggggcagcgaaatcgtgctgactcagagcccgggaactctttcactgtccccgggagaacgggccactctctcgtgccgggccacccagtccatcggctcctccttccttgcctggtaccagcagaggccaggacaggcgccccgcctgctgatctacggtgcttcccaacgcgccactggcattcctgaccggttcagcggcagagggtcgggaaccgatttcacactgaccatttcccgggtggagcccgaagattcggcagtctactactgtcagcattacgagtcctccccttcatggaccttcggtcaagggaccaaagtggagatcaagaccactaccccagcaccgaggccacccaccccggctcctaccatcgcctcccagcctctgtccctgcgtccggaggcatgtagacccgcagctggtggggccgtgcatacccggggtcttgacttcgcctgcgatatctacatttgggcccctctggctggtacttgcggggtcctgctgctttcactcgtgatcactctttactgtaagcgcggtcggaagaagctgctgtacatctttaagcaacccttcatgaggcctgtgcagactactcaagaggaggacggctgttcatgccggttcccagaggaggaggaaggcggctgcgaactgcgcgtgaaattcagccgcagcgcagatgctccagcctacaagcaggggcagaaccagctctacaacgaactcaatcttggtcggagagaggagtacgacgtgctggacaagcggagaggacgggacccagaaatgggcgggaagccgcgcagaaagaatccccaagagggcctgtacaacgagctccaaaaggataagatggcagaagcctatagcgagattggtatgaaaggggaacgcagaagaggcaaaggccacgacggactgtaccagggactcagcaccgccaccaaggacacctatgacgctcttcacatgcaggccctgccgcctcgg

SEQ ID NO: 915 - DNA, 1455 bp, synthetic construct
  misc_feature 1..1455: note = source = /note="Description of Artificial Sequence: Synthetic polynucleotide"
  source 1..1455: mol_type = other DNA
atggccctccctgtcaccgccctgctgcttccgctggctcttctgctccacgccgctcggcccgaggtgcagttggtcgaaagcgggggcgggcttgtgcagcctggcggatcactgcggctgtcctgcgcggcatcaggcttcacgttttcttcctacgccatgtcctgggtgcgccaggcccctggaaagggactggaatgggtgtccgcgatttcggggtccggcgggagcacctactacgccgattccgtgaagggccgcttcactatctcgcgggacaactccaagaacaccctctacctccaaatgaatagcctgcgggccgaggataccgccgtctactattgcgctaaggtcgtgcgcgacggaatggacgtgtggggacagggtaccaccgtgacagtgtcctcggggggaggcggtagcggcggaggaggaagcggtggtggaggttccgagattgtgctgactcaatcacccgcgaccctgagcctgtcccccggcgaaagggccactctgtcctgtcgggccagccaatcagtctcctcctcgtacctggcctggtaccagcagaagccaggacaggctccgagactccttatctatggcgcatcctcccgcgccaccggaatcccggataggttctcgggaaacggatcggggaccgacttcactctcaccatctcccggctggaaccggaggacttcgccgtgtactactgccagcagtacggcagcccgcctagattcactttcggccccggcaccaaagtggacatcaagaccactaccccagcaccgaggccacccaccccggctcctaccatcgcctcccagcctctgtccctgcgtccggaggcatgtagacccgcagctggtggggccgtgcatacccggggtcttgacttcgcctgcgatatctacatttgggcccctctggctggtacttgcggggtcctgctgctttcactcgtgatcactctttactgtaagcgcggtcggaagaagctgctgtacatctttaagcaacccttcatgaggcctgtgcagactactcaagaggaggacggctgttcatgccggttcccagaggaggaggaaggcggctgcgaactgcgcgtgaaattcagccgcagcgcagatgctccagcctacaagcaggggcagaaccagctctacaacgaactcaatcttggtcggagagaggagtacgacgtgctggacaagcggagaggacgggacccagaaatgggcgggaagccgcgcagaaagaatccccaagagggcctgtacaacgagctccaaaaggataagatggcagaagcctatagcgagattggtatgaaaggggaacgcagaagaggcaaaggccacgacggactgtaccagggactcagcaccgccaccaaggacacctatgacgctcttcacatgcaggccctgccgcctcgg

SEQ ID NO: 916 - DNA, 1458 bp, synthetic construct
  misc_feature 1..1458: note = source = /note="Description of Artificial Sequence: Synthetic polynucleotide"
  source 1..1458: mol_type = other DNA
atggccctccctgtcaccgccctgctgcttccgctggctcttctgctccacgccgctcggcccgaagtgcagctgctggagtccggcggtggattggtgcaaccggggggatcgctcagactgtcctgtgcggcgtcaggcttcaccttctcgagctacgccatgtcatgggtcagacaggcccctggaaagggtctggaatgggtgtccgccatttccgggagcgggggatctacatactacgccgatagcgtgaagggccgcttcaccatttcccgggacaactccaagaacactctctatctgcaaatgaactccctccgcgctgaggacactgccgtgtactactgcgccaaaatccctcagaccggcaccttcgactactggggacaggggactctggtcaccgtcagcagcggtggcggaggttcggggggaggaggaagcggcggcggagggtccgagattgtgctgacccagtcacccggcactttgtccctgtcgcctggagaaagggccaccctttcctgccgggcatcccaatccgtgtcctcctcgtacctggcctggtaccagcagaggcccggacaggccccacggcttctgatctacggagcaagcagccgcgcgaccggtatcccggaccggttttcgggctcgggctcaggaactgacttcaccctcaccatctcccgcctggaacccgaagatttcgctgtgtattactgccagcactacggcagctccccgtcctggacgttcggccagggaactcggctggagatcaagaccactaccccagcaccgaggccacccaccccggctcctaccatcgcctcccagcctctgtccctgcgtccggaggcatgtagacccgcagctggtggggccgtgcatacccggggtcttgacttcgcctgcgatatctacatttgggcccctctggctggtacttgcggggtcctgctgctttcactcgtgatcactctttactgtaagcgcggtcggaagaagctgctgtacatctttaagcaacccttcatgaggcctgtgcagactactcaagaggaggacggctgttcatgccggttcccagaggaggaggaaggcggctgcgaactgcgcgtgaaattcagccgcagcgcagatgctccagcctacaagcaggggcagaaccagctctacaacgaactcaatcttggtcggagagaggagtacgacgtgctggacaagcggagaggacgggacccagaaatgggcgggaagccgcgcagaaagaatccccaagagggcctgtacaacgagctccaaaaggataagatggcagaagcctatagcgagattggtatgaaaggggaacgcagaagaggcaaaggccacgacggactgtaccagggactcagcaccgccaccaaggacacctatgacgctcttcacatgcaggccctgccgcctcgg

SEQ ID NO: 917 - DNA, 1476 bp, synthetic construct
  misc_feature 1..1476: note = source = /note="Description of Artificial Sequence: Synthetic polynucleotide"
  source 1..1476: mol_type = other DNA
atggccctccctgtcaccgccctgctgcttccgctggctcttctgctccacgccgctcggcccgaagtgcaactggtggaaaccggtggaggactcgtgcagcctggcggcagcctccggctgagctgcgccgcttcgggattcaccttttcctcctacgcgatgtcttgggtcagacaggcccccggaaaggggctggaatgggtgtcagccatctccggctccggcggatcaacgtactacgccgactccgtgaaaggccggttcaccatgtcgcgcgagaatgacaagaactccgtgttcctgcaaatgaactccctgagggtggaggacaccggagtgtactattgtgcgcgcgccaactacaagagagagctgcggtactactacggaatggacgtctggggacagggaactatggtgaccgtgtcatccggtggagggggaagcggcggtggaggcagcgggggcgggggttcagaaattgtcatgacccagtccccgggaactctttccctctcccccggggaatccgcgactttgtcctgccgggccagccagcgcgtggcctcgaactacctcgcatggtaccagcataagccaggccaagccccttccctgctgatttccggggctagcagccgcgccactggcgtgccggataggttctcgggaagcggctcgggtaccgatttcaccctggcaatctcgcggctggaaccggaggattcggccgtgtactactgccagcactatgactcatccccctcctggacattcggacagggcaccaaggtcgagatcaagaccactaccccagcaccgaggccacccaccccggctcctaccatcgcctcccagcctctgtccctgcgtccggaggcatgtagacccgcagctggtggggccgtgcatacccggggtcttgacttcgcctgcgatatctacatttgggcccctctggctggtacttgcggggtcctgctgctttcactcgtgatcactctttactgtaagcgcggtcggaagaagctgctgtacatctttaagcaacccttcatgaggcctgtgcagactactcaagaggaggacggctgttcatgccggttcccagaggaggaggaaggcggctgcgaactgcgcgtgaaattcagccgcagcgcagatgctccagcctacaagcaggggcagaaccagctctacaacgaactcaatcttggtcggagagaggagtacgacgtgctggacaagcggagaggacgggacccagaaatgggcgggaagccgcgcagaaagaatccccaagagggcctgtacaacgagctccaaaaggataagatggcagaagcctatagcgagattggtatgaaaggggaacgcagaagaggcaaaggccacgacggactgtaccagggactcagcaccgccaccaaggacacctatgacgctcttcacatgcaggccctgccgcctcgg

SEQ ID NO: 918 - DNA, 1464 bp, synthetic construct
  misc_feature 1..1464: note = source = /note="Description of Artificial Sequence: Synthetic polynucleotide"
  source 1..1464: mol_type = other DNA
atggccctccctgtcaccgccctgctgcttccgctggctcttctgctccacgccgctcggcccgaagtgcagctgctcgaaaccggtggagggctggtgcagccagggggctccctgaggctttcatgcgccgctagcggattctccttctcctcttacgccatgtcgtgggtccgccaagcccctggaaaaggcctggaatgggtgtccgcgatttccgggagcggaggttcgacctattacgccgactccgtgaagggccgctttaccatctcccgggataactccaagaacactctgtacctccaaatgaactcgctgagagccgaggacaccgccgtgtattactgcgcgaaggcgctggtcggcgcgactggggcattcgacatctggggacagggaactcttgtgaccgtgtcgagcggaggcggcggctccggcggaggagggagcgggggcggtggttccgaaatcgtgttgactcagtccccgggaaccctgagcttgtcacccggggagcgggccactctctcctgtcgcgcctcccaatcgctctcatccaatttcctggcctggtaccagcagaagcccggacaggccccgggcctgctcatctacggcgcttcaaactgggcaacgggaacccctgatcggttcagcggaagcggatcgggtactgactttaccctgaccatcaccagactggaaccggaggacttcgccgtgtactactgccagtactacggcacctcccccatgtacacattcggacagggtaccaaggtcgagattaagaccactaccccagcaccgaggccacccaccccggctcctaccatcgcctcccagcctctgtccctgcgtccggaggcatgtagacccgcagctggtggggccgtgcatacccggggtcttgacttcgcctgcgatatctacatttgggcccctctggctggtacttgcggggtcctgctgctttcactcgtgatcactctttactgtaagcgcggtcggaagaagctgctgtacatctttaagcaacccttcatgaggcctgtgcagactactcaagaggaggacggctgttcatgccggttcccagaggaggaggaaggcggctgcgaactgcgcgtgaaattcagccgcagcgcagatgctccagcctacaagcaggggcagaaccagctctacaacgaactcaatcttggtcggagagaggagtacgacgtgctggacaagcggagaggacgggacccagaaatgggcgggaagccgcgcagaaagaatccccaagagggcctgtacaacgagctccaaaaggataagatggcagaagcctatagcgagattggtatgaaaggggaacgcagaagaggcaaaggccacgacggactgtaccagggactcagcaccgccaccaaggacacctatgacgctcttcacatgcaggccctgccgcctcgg

SEQ ID NO: 919 - DNA, 1464 bp, synthetic construct
  misc_feature 1..1464: note = source = /note="Description of Artificial Sequence: Synthetic polynucleotide"
  source 1..1464: mol_type = other DNA
atggccctccctgtcaccgccctgctgcttccgctggctcttctgctccacgccgctcggcccgaagtgcagctgcttgagagcggtggaggtctggtgcagcccgggggatcactgcgcctgtcctgtgccgcgtccggtttcactttctcctcgtacgccatgtcgtgggtcagacaggcaccgggaaagggactggaatgggtgtcagccatttcgggttcggggggcagcacctactacgctgactccgtgaagggccggttcaccatttcccgcgacaactccaagaacaccttgtacctccaaatgaactccctgcgggccgaagataccgccgtgtattactgcgtgctgtggttcggagagggattcgacccgtggggacaaggaacactcgtgactgtgtcatccggcggaggcggcagcggtggcggcggttccggcggcggcggatctgacatcgtgttgacccagtcccctctgagcctgccggtcactcctggcgaaccagccagcatctcctgccggtcgagccagtccctcctgcactccaatgggtacaactacctcgattggtatctgcaaaagccgggccagagcccccagctgctgatctaccttgggtcaaaccgcgcttccggggtgcctgatagattctccgggtccgggagcggaaccgactttaccctgaaaatctcgagggtggaggccgaggacgtcggagtgtactactgcatgcaggcgctccagactcccctgaccttcggaggaggaacgaaggtcgacatcaagaccactaccccagcaccgaggccacccaccccggctcctaccatcgcctcccagcctctgtccctgcgtccggaggcatgtagacccgcagctggtggggccgtgcatacccggggtcttgacttcgcctgcgatatctacatttgggcccctctggctggtacttgcggggtcctgctgctttcactcgtgatcactctttactgtaagcgcggtcggaagaagctgctgtacatctttaagcaacccttcatgaggcctgtgcagactactcaagaggaggacggctgttcatgccggttcccagaggaggaggaaggcggctgcgaactgcgcgtgaaattcagccgcagcgcagatgctccagcctacaagcaggggcagaaccagctctacaacgaactcaatcttggtcggagagaggagtacgacgtgctggacaagcggagaggacgggacccagaaatgggcgggaagccgcgcagaaagaatccccaagagggcctgtacaacgagctccaaaaggataagatggcagaagcctatagcgagattggtatgaaaggggaacgcagaagaggcaaaggccacgacggactgtaccagggactcagcaccgccaccaaggacacctatgacgctcttcacatgcaggccctgccgcctcgg

SEQ ID NO: 920 - DNA, 1485 bp, synthetic construct
  misc_feature 1..1485: note = source = /note="Description of Artificial Sequence: Synthetic polynucleotide"
  source 1..1485: mol_type = other DNA
atggccctccctgtcaccgccctgctgcttccgctggctcttctgctccacgccgctcggccccaagtgcagctcgtggagtcaggcggaggactggtgcagcccgggggctccctgagactttcctgcgcggcatcgggttttaccttctcctcctatgctatgtcctgggtgcgccaggccccgggaaagggactggaatgggtgtccgcaatcagcggtagcgggggctcaacatactacgccgactccgtcaagggtcgcttcactatttcccgggacaactccaagaataccctgtacctccaaatgaacagcctcagggccgaggatactgccgtgtactactgcgccaaagtcggatacgatagctccggttactaccgggactactacggaatggacgtgtggggacagggcaccaccgtgaccgtgtcaagcggcggaggcggttcaggagggggaggctccggcggtggagggtccgaaatcgtcctgactcagtcgcctggcactctgtcgttgtccccgggggagcgcgctaccctgtcgtgtcgggcgtcgcagtccgtgtcgagctcctacctcgcgtggtaccagcagaagcccggacaggcccctagacttctgatctacggcacttcttcacgcgccaccgggatcagcgacaggttcagcggctccggctccgggaccgacttcaccctgaccattagccggctggagcctgaagatttcgccgtgtattactgccaacactacggaaactcgccgccaaagttcacgttcggacccggaaccaagctggaaatcaagaccactaccccagcaccgaggccacccaccccggctcctaccatcgcctcccagcctctgtccctgcgtccggaggcatgtagacccgcagctggtggggccgtgcatacccggggtcttgacttcgcctgcgatatctacatttgggcccctctggctggtacttgcggggtcctgctgctttcactcgtgatcactctttactgtaagcgcggtcggaagaagctgctgtacatctttaagcaacccttcatgaggcctgtgcagactactcaagaggaggacggctgttcatgccggttcccagaggaggaggaaggcggctgcgaactgcgcgtgaaattcagccgcagcgcagatgctccagcctacaagcaggggcagaaccagctctacaacgaactcaatcttggtcggagagaggagtacgacgtgctggacaagcggagaggacgggacccagaaatgggcgggaagccgcgcagaaagaatccccaagagggcctgtacaacgagctccaaaaggataagatggcagaagcctatagcgagattggtatgaaaggggaacgcagaagaggcaaaggccacgacggactgtaccagggactcagcaccgccaccaaggacacctatgacgctcttcacatgcaggccctgccgcctcgg

SEQ ID NO: 921 - DNA, 1470 bp, synthetic construct
  misc_feature 1..1470: note = source = /note="Description of Artificial Sequence: Synthetic polynucleotide"
  source 1..1470: mol_type = other DNA
atggccctccctgtcaccgccctgctgcttccgctggctcttctgctccacgccgctcggcccgaagtccaactggtggagtccgggggagggctcgtgcagcccggaggcagccttcggctgtcgtgcgccgcctccgggttcacgttctcatcctacgcgatgtcgtgggtcagacaggcaccaggaaagggactggaatgggtgtccgccattagcggctccggcggtagcacctactatgccgactcagtgaagggaaggttcactatctcccgcgacaacagcaagaacaccctgtacctccaaatgaactctctgcgggccgaggataccgcggtgtactattgcgccaagatgggttggtccagcggatacttgggagccttcgacatttggggacagggcactactgtgaccgtgtcctccgggggtggcggatcgggaggcggcggctcgggtggagggggttccgaaatcgtgttgacccagtcaccgggaaccctctcgctgtccccgggagaacgggctacactgtcatgtagagcgtcccagtccgtggcttcctcgttcctggcctggtaccagcagaagccgggacaggcaccccgcctgctcatctacggagccagcggccgggcgaccggcatccctgaccgcttctccggttccggctcgggcaccgactttactctgaccattagcaggcttgagcccgaggattttgccgtgtactactgccaacactacggggggagccctcgcctgaccttcggaggcggaactaaggtcgatatcaaaaccactaccccagcaccgaggccacccaccccggctcctaccatcgcctcccagcctctgtccctgcgtccggaggcatgtagacccgcagctggtggggccgtgcatacccggggtcttgacttcgcctgcgatatctacatttgggcccctctggctggtacttgcggggtcctgctgctttcactcgtgatcactctttactgtaagcgcggtcggaagaagctgctgtacatctttaagcaacccttcatgaggcctgtgcagactactcaagaggaggacggctgttcatgccggttcccagaggaggaggaaggcggctgcgaactgcgcgtgaaattcagccgcagcgcagatgctccagcctacaagcaggggcagaaccagctctacaacgaactcaatcttggtcggagagaggagtacgacgtgctggacaagcggagaggacgggacccagaaatgggcgggaagccgcgcagaaagaatccccaagagggcctgtacaacgagctccaaaaggataagatggcagaagcctatagcgagattggtatgaaaggggaacgcagaagaggcaaaggccacgacggactgtaccagggactcagcaccgccaccaaggacacctatgacgctcttcacatgcaggccctgccgcctcgg

SEQ ID NO: 922-949 - skipped (28 entries)

SEQ ID NO: 950 - protein, 2002 aa, Homo sapiens
MEQDRTNHVEGNRLSPFLIPSPPICQTEPLATKLQNGSPLPERAHPEVNGDTKWHSFKSYYGIPCMKGSQNSRVSPDFTQESRGYSKCLQNGGIKRTVSEPSLSGLLQIKKLKQDQKANGERRNFGVSQERNPGESSQPNVSDLSDKKESVSSVAQENAVKDFTSFSTHNCSGPENPELQILNEQEGKSANYHDKNIVLLKNKAVLMPNGATVSASSVEHTHGELLEKTLSQYYPDCVSIAVQKTTSHINAINSQATNELSCEITHPSHTSGQINSAQTSNSELPPKPAAVVSEACDADDADNASKLAAMLNTCSFQKPEQLQQQKSVFEICPSPAENNIQGTTKLASGEEFCSGSSSNLQAPGGSSERYLKQNEMNGAYFKQSSVFTKDSFSATTTPPPPSQLLLSPPPPLPQVPQLPSEGKSTLNGGVLEEHHHYPNQSNTTLLREVKIEGKPEAPPSQSPNPSTHVCSPSPMLSERPQNNCVNRNDIQTAGTMTVPLCSEKTRPMSEHLKHNPPIFGSSGELQDNCQQLMRNKEQEILKGRDKEQTRDLVPPTQHYLKPGWIELKAPRFHQAESHLKRNEASLPSILQYQPNLSNQMTSKQYTGNSNMPGGLPRQAYTQKTTQLEHKSQMYQVEMNQGQSQGTVDQHLQFQKPSHQVHFSKTDHLPKAHVQSLCGTRFHFQQRADSQTEKLMSPVLKQHLNQQASETEPFSNSHLLQHKPHKQAAQTQPSQSSHLPQNQQQQQKLQIKNKEEILQTFPHPQSNNDQQREGSFFGQTKVEECFHGENQYSKSSEFETHNVQMGLEEVQNINRRNSPYSQTMKSSACKIQVSCSNNTHLVSENKEQTTHPELFAGNKTQNLHHMQYFPNNVIPKQDLLHRCFQEQEQKSQQASVLQGYKNRNQDMSGQQAAQLAQQRYLIHNHANVFPVPDQGGSHTQTPPQKDTQKHAALRWHLLQKQEQQQTQQPQTESCHSQMHRPIKVEPGCKPHACMHTAPPENKTWKKVTKQENPPASCDNVQQKSIIETMEQHLKQFHAKSLFDHKALTLKSQKQVKVEMSGPVTVLTRQTTAAELDSHTPALEQQTTSSEKTPTKRTAASVLNNFIESPSKLLDTPIKNLLDTPVKTQYDFPSCRCVEQIIEKDEGPFYTHLGAGPNVAAIREIMEERFGQKGKAIRIERVIYTGKEGKSSQGCPIAKWVVRRSSSEEKLLCLVRERAGHTCEAAVIVILILVWEGIPLSLADKLYSELTETLRKYGTLTNRRCALNEERTCACQGLDPETCGASFSFGCSWSMYYNGCKFARSKIPRKFKLLGDDPKEEEKLESHLQNLSTLMAPTYKKLAPDAYNNQIEYEHRAPECRLGLKEGRPFSGVTACLDFCAHAHRDLHNMQNGSTLVCTLTREDNREFGGKPEDEQLHVLPLYKVSDVDEFGSVEAQEEKKRSGAIQVLSSFRRKVRMLAEPVKTCRQRKLEAKKAAAEKLSSLENSSNKNEKEKSAPSRTKQTENASQAKQLAELLRLSGPVMQQSQQPQPLQKQPPQPQQQQRPQQQQPHHPQTESVNSYSASGSTNPYMRRPNPVSPYPNSSHTSDIYGSTSPMNFYSTSSQAAGSYLNSSNPMNPYPGLLNQNTQYPSYQCNGNLSVDNCSPYLGSYSPQSQPMDLYRYPSQDPLSKLSLPPIHTLYQPRFGNSQSFTSKYLGYGNQNMQGDGFSSCTIRPNVHHVGKLPPYPTHEMDGHFMGATSRLPPNLSNPNMDYKNGEHHSPSHIIHNYSAAPGMFNSSLHALHLQNKENDMLSHTANGLSKMLPALNHDRTACVQGGLHKLSDANGQEKQPLALVQGVASGAEDNDEVWSDSEQSFLDPDIGGVAVAPTHGSILIECAKRELHATTPLKNPNRNHPTRISLVFYQHKSMNEPKHGLALWEAKMAEKAREKEEECEKYGPDYVPQKSHGKKVKREPAEPHETSEPTYLRFIKSLAERTMSVTTDSTVTTSPYAFTRVTGPYNRYI

SEQ ID NO: 951 - DNA, 9796 bp, Homo sapiens
  source 1..9796: mol_type = other DNA
ggcagtggcagcggcgagagcttgggcggccgccgccgcctcctcgcgagcgccgcgcgcccgggtcccgctcgcatgcaagtcacgtccgccccctcggcgcggccgccccgagacgccggccccgctgagtgatgagaacagacgtcaaactgccttatgaatattgatgcggaggctaggctgctttcgtagagaagcagaaggaagcaagatggctgccctttaggatttgttagaaaggagacccgactgcaactgctggattgctgcaaggctgagggacgagaacgaggctggcaaacattcagcagcacaccctctcaagattgtttacttgcctttgctcctgttgagttacaacgcttggaagcaggagatgggctcagcagcagccaataggacatgatccaggaagagcagtaagggactgagctgctgaattcaactagagggcagccttgtggatggccccgaagcaagcctgatggaacaggatagaaccaaccatgttgagggcaacagactaagtccattcctgataccatcacctcccatttgccagacagaacctctggctacaaagctccagaatggaagcccactgcctgagagagctcatccagaagtaaatggagacaccaagtggcactctttcaaaagttattatggaataccctgtatgaagggaagccagaatagtcgtgtgagtcctgactttacacaagaaagtagagggtattccaagtgtttgcaaaatggaggaataaaacgcacagttagtgaaccttctctctctgggctccttcagatcaagaaattgaaacaagaccaaaaggctaatggagaaagacgtaacttcggggtaagccaagaaagaaatccaggtgaaagcagtcaaccaaatgtctccgatttgagtgataagaaagaatctgtgagttctgtagcccaagaaaatgcagttaaagatttcaccagtttttcaacacataactgcagtgggcctgaaaatccagagcttcagattctgaatgagcaggaggggaaaagtgctaattaccatgacaagaacattgtattacttaaaaacaaggcagtgctaatgcctaatggtgctacagtttctgcctcttccgtggaacacacacatggtgaactcctggaaaaaacactgtctcaatattatccagattgtgtttccattgcggtgcagaaaaccacatctcacataaatgccattaacagtcaggctactaatgagttgtcctgtgagatcactcacccatcgcatacctcagggcagatcaattccgcacagacctctaactctgagctgcctccaaagccagctgcagtggtgagtgaggcctgtgatgctgatgatgctgataatgccagtaaactagctgcaatgctaaatacctgttcctttcagaaaccagaacaactacaacaacaaaaatcagtttttgagatatgcccatctcctgcagaaaataacatccagggaaccacaaagctagcgtctggtgaagaattctgttcaggttccagcagcaatttgcaagctcctggtggcagctctgaacggtatttaaaacaaaatgaaatgaatggtgcttacttcaagcaaagctcagtgttcactaaggattccttttctgccactaccacaccaccaccaccatcacaattgcttctttctccccctcctcctcttccacaggttcctcagcttccttcagaaggaaaaagcactctgaatggtggagttttagaagaacaccaccactaccccaaccaaagtaacacaacacttttaagggaagtgaaaatagagggtaaacctgaggcaccaccttcccagagtcctaatccatctacacatgtatgcagcccttctccgatgctttctgaaaggcctcagaataattgtgtgaacaggaatgacatacagactgcagggacaatgactgttccattgtgttctgagaaaacaagaccaatgtcagaacacctcaagcataacccaccaatttttggtagcagtggagagctacaggacaactgccagcagttgatgagaaacaaagagcaagagattctgaagggtcgagacaaggagcaaacacgagatcttgtgcccccaacacagcactatctgaaaccaggatggattgaattgaaggcccctcgttttcaccaagcggaatcccatctaaaacgtaatgaggcatcactgccatcaattcttcagtatcaacccaatctctccaatcaaatgacctccaaacaatacactggaaattccaacatgcctggggggctcccaaggcaagcttacacccagaaaacaacacagctggagcacaagtcacaaatgtaccaagttgaaatgaatcaagggcagtcccaaggtacagtggaccaacatctccagttccaaaaaccctcacaccaggtgcacttctccaaaacagaccatttaccaaaagctcatgtgcagtcactgtgtggcactagatttcattttcaacaaagagcagattcccaaactgaaaaacttatgtccccagtgttgaaacagcacttgaatcaacaggcttcagagactgagccattttcaaactcacaccttttgcaacataagcctcataaacaggcagcacaaacacaaccatcccagagttcacatctccctcaaaaccagcaacagcagcaaaaattacaaataaagaataaagaggaaatactccagacttttcctcacccccaaagcaacaatgatcagcaaagagaaggatcattctttggccagactaaagtggaagaatgttttcatggtgaaaatcagtattcaaaatcaagcgagttcgagactcataatgtccaaatgggactggaggaagtacagaatataaatcgtagaaattccccttatagtcagaccatgaaatcaagtgcatgcaaaatacaggtttcttgttcaaacaatacacacctagtttcagagaataaagaacagactacacatcctgaactttttgcaggaaacaagacccaaaacttgcatcacatgcaatattttccaaataatgtgatcccaaagcaagatcttcttcacaggtgctttcaagaacaggagcagaagtcacaacaagcttcagttctacagggatataaaaatagaaaccaagatatgtctggtcaacaagctgcgcaacttgctcagcaaaggtacttgatacataaccatgcaaatgtttttcctgtgcctgaccagggaggaagtcacactcagacccctccccagaaggacactcaaaagcatgctgctctaaggtggcatctcttacagaagcaagaacagcagcaaacacagcaaccccaaactgagtcttgccatagtcagatgcacaggccaattaaggtggaacctggatgcaagccacatgcctgtatgcacacagcaccaccagaaaacaaaacatggaaaaaggtaactaagcaagagaatccacctgcaagctgtgataatgtgcagcaaaagagcatcattgagaccatggagcagcatctgaagcagtttcacgccaagtcgttatttgaccataaggctcttactctcaaatcacagaagcaagtaaaagttgaaatgtcagggccagtcacagttttgactagacaaaccactgctgcagaacttgatagccacaccccagctttagagcagcaaacaacttcttcagaaaagacaccaaccaaaagaacagctgcttctgttctcaataattttatagagtcaccttccaaattactagatactcctataaaaaatttattggatacacctgtcaagactcaatatgatttcccatcttgcagatgtgtagagcaaattattgaaaaagatgaaggtcctttttatacccatctaggagcaggtcctaatgtggcagctattagagaaatcatggaagaaaggtttggacagaagggtaaagctattaggattgaaagagtcatctatactggtaaagaaggcaaaagttctcagggatgtcctattgctaagtgggtggttcgcagaagcagcagtgaagagaagctactgtgtttggtgcgggagcgagctggccacacctgtgaggctgcagtgattgtgattctcatcctggtgtgggaaggaatcccgctgtctctggctgacaaactctactcggagcttaccgagacgctgaggaaatacggcacgctcaccaatcgccggtgtgccttgaatgaagagagaacttgcgcctgtcaggggctggatccagaaacctgtggtgcctccttctcttttggttgttcatggagcatgtactacaatggatgtaagtttgccagaagcaagatcccaaggaagtttaagctgcttggggatgacccaaaagaggaagagaaactggagtctcatttgcaaaacctgtccactcttatggcaccaacatataagaaacttgcacctgatgcatataataatcagattgaatatgaacacagagcaccagagtgccgtctgggtctgaaggaaggccgtccattctcaggggtcactgcatgtttggacttctgtgctcatgcccacagagacttgcacaacatgcagaatggcagcacattggtatgcactctcactagagaagacaatcgagaatttggaggaaaacctgaggatgagcagcttcacgttctgcctttatacaaagtctctgacgtggatgagtttgggagtgtggaagctcaggaggagaaaaaacggagtggtgccattcaggtactgagttcttttcggcgaaaagtcaggatgttagcagagccagtcaagacttgccgacaaaggaaactagaagccaagaaagctgcagctgaaaagctttcctccctggagaacagctcaaataaaaatgaaaaggaaaagtcagccccatcacgtacaaaacaaactgaaaacgcaagccaggctaaacagttggcagaacttttgcgactttcaggaccagtcatgcagcagtcccagcagccccagcctctacagaagcagccaccacagccccagcagcagcagagaccccagcagcagcagccacatcaccctcagacagagtctgtcaactcttattctgcttctggatccaccaatccatacatgagacggcccaatccagttagtccttatccaaactcttcacacacttcagatatctatggaagcaccagccctatgaacttctattccacctcatctcaagctgcaggttcatatttgaattcttctaatcccatgaacccttaccctgggcttttgaatcagaatacccaatatccatcatatcaatgcaatggaaacctatcagtggacaactgctccccatatctgggttcctattctccccagtctcagccgatggatctgtataggtatccaagccaagaccctctgtctaagctcagtctaccacccatccatacactttaccagccaaggtttggaaatagccagagttttacatctaaatacttaggttatggaaaccaaaatatgcagggagatggtttcagcagttgtaccattagaccaaatgtacatcatgtagggaaattgcctccttatcccactcatgagatggatggccacttcatgggagccacctctagattaccacccaatctgagcaatccaaacatggactataaaaatggtgaacatcattcaccttctcacataatccataactacagtgcagctccgggcatgttcaacagctctcttcatgccctgcatctccaaaacaaggagaatgacatgctttcccacacagctaatgggttatcaaagatgcttccagctcttaaccatgatagaactgcttgtgtccaaggaggcttacacaaattaagtgatgctaatggtcaggaaaagcagccattggcactagtccagggtgtggcttctggtgcagaggacaacgatgaggtctggtcagacagcgagcagagctttctggatcctgacattgggggagtggccgtggctccaactcatgggtcaattctcattgagtgtgcaaagcgtgagctgcatgccacaacccctttaaagaatcccaataggaatcaccccaccaggatctccctcgtcttttaccagcataagagcatgaatgagccaaaacatggcttggctctttgggaagccaaaatggctgaaaaagcccgtgagaaagaggaagagtgtgaaaagtatggcccagactatgtgcctcagaaatcccatggcaaaaaagtgaaacgggagcctgctgagccacatgaaacttcagagcccacttacctgcgtttcatcaagtctcttgccgaaaggaccatgtccgtgaccacagactccacagtaactacatctccatatgccttcactcgggtcacagggccttacaacagatatatatgatatcacccccttttgttggttacctcacttgaaaagaccacaaccaacctgtcagtagtatagttctcatgacgtgggcagtggggaaaggtcacagtattcatgacaaatgtggtgggaaaaacctcagctcaccagcaacaaaagaggttatcttaccatagcacttaattttcactggctcccaagtggtcacagatggcatctaggaaaagaccaaagcattctatgcaaaaagaaggtggggaagaaagtgttccgcaatttacatttttaaacactggttctattattggacgagatgatatgtaaatgtgatcccccccccccgcttacaactctacacatctgtgaccacttttaataatatcaagtttgcatagtcatggaacacaaatcaaacaagtactgtagtattacagtgacaggaatcttaaaataccatctggtgctgaatatatgatgtactgaaatactggaattatggctttttgaaatgcagtttttactgtaatcttaacttttatttatcaaaatagctacaggaaacatgaatagcaggaaaacactgaatttgtttggatgttctaagaaatggtgctaagaaaatggtgtctttaatagctaaaaatttaatgcctttatatcatcaagatgctatcagtgtactccagtgcccttgaataataggggtaccttttcattcaagtttttatcataattacctattcttacacaagcttagtttttaaaatgtggacattttaaaggcctctggattttgctcatccagtgaagtccttgtaggacaataaacgtatatatgtacatatatacacaaacatgtatatgtgcacacacatgtatatgtataaatattttaaatggtgttttagaagcactttgtctacctaagctttgacaacttgaacaatgctaaggtactgagatgtttaaaaaacaagtttactttcattttagaatgcaaagttgatttttttaaggaaacaaagaaagcttttaaaatatttttgcttttagccatgcatctgctgatgagcaattgtgtccatttttaacacagccagttaaatccaccatggggcttactggattcaagggaatacgttagtccacaaaacatgttttctggtgctcatctcacatgctatactgtaaaacagttttatacaaaattgtatgacaagttcattgctcaaaaatgtacagttttaagaattttctattaactgcaggtaataattagctgcatgctgcagactcaacaaagctagttcactgaagcctatgctattttatggatcataggctcttcagagaactgaatggcagtctgcctttgtgttgataattatgtacattgtgacgttgtcatttcttagcttaagtgtcctctttaacaagaggattgagcagactgatgcctgcataagatgaataaacagggttagttccatgtgaatctgtcagttaaaaagaaacaaaaacaggcagctggtttgctgtggtggttttaaatcattaatttgtataaagaagtgaaagagttgtatagtaaattaaattgtaaacaaaacttttttaatgcaatgctttagtattttagtactgtaaaaaaattaaatatatacatatatatatatatatatatatatatatatatgagtttgaagcagaattcacatcatgatggtgctactcagcctgctacaaatatatcataatgtgagctaagaattcattaaatgtttgagtgatgttcctacttgtcatatacctcaacactagtttggcaataggatattgaactgagagtgaaagcattgtgtaccatcatttttttccaagtccttttttttattgttaaaaaaaaaagcataccttttttcaatacttgatttcttagcaagtataacttgaacttcaacctttttgttctaaaaattcagggatatttcagctcatgctctccctatgccaacatgtcacctgtgtttatgtaaaattgttgtaggttaataaatatattctttgtcagggatttaacccttttattttgaatcccttctattttacttgtacatgtgctgatgtaactaaaactaattttgtaaatctgttggctctttttattgtaaagaaaagcattttaaaagtttgaggaatcttttgactgtttcaagcaggaaaaaaaaattacatgaaaatagaatgcactgagttgataaagggaaaaattgtaaggcaggagtttggcaagtggctgttggccagagacttacttgtaactctctaaatgaagtttttttgatcctgtaatcactgaaggtacatactccatgtggacttcccttaaacaggcaaacacctacaggtatggtgtgcaacagattgtacaattacattttggcctaaatacatttttgcttactagtatttaaaataaattcttaatcagaggaggcctttgggttttattggtcaaatctttgtaagctggcttttgtctttttaaaaaatttcttgaatttgtggttgtgtccaatttgcaaacatttccaaaaatgtttgctttgcttacaaaccacatgattttaatgttttttgtataccataatatctagccccaaacatttgattactacatgtgcattggtgattttgatcatccattcttaatatttgatttctgtgtcacctactgtcatttgttaaactgctggccaacaagaacaggaagtatagtttggggggttggggagagtttacataaggaagagaagaaattgagtggcatattgtaaatatcagatctataattgtaaatataaaacctgcctcagttagaatgaatggaaagcagatctacaatttgctaatataggaatatcaggttgactatatagccatacttgaaaatgcttctgagtggtgtcaactttacttgaatgaatttttcatcttgattgacgcacagtgatgtacagttcacttctgaagctagtggttaacttgtgtaggaaacttttgcagtttgacactaagataacttctgtgtgcatttttctatgcttttttaaaaactagtttcatttcattttcatgagatgtttggtttataagatctgaggatggttataaatactgtaagtattgtaatgttatgaatgcaggttatttgaaagctgtttattattatatcattcctgataatgctatgtgagtgtttttaataaaatttatatttatttaatgcactctaaaaaaaaaaaaaaaaaa

SEQ ID NO: 952 - DNA, 9437 bp, Homo sapiens
  source 1..9437: mol_type = other DNA
aagcagaaggaagcaagatggctgccctttaggatttgttagaaaggagacccgactgcaactgctggattgctgcaaggctgagggacgagaacgagaattcaactagagggcagccttgtggatggccccgaagcaagcctgatggaacaggatagaaccaaccatgttgagggcaacagactaagtccattcctgataccatcacctcccatttgccagacagaacctctggctacaaagctccagaatggaagcccactgcctgagagagctcatccagaagtaaatggagacaccaagtggcactctttcaaaagttattatggaataccctgtatgaagggaagccagaatagtcgtgtgagtcctgactttacacaagaaagtagagggtattccaagtgtttgcaaaatggaggaataaaacgcacagttagtgaaccttctctctctgggctccttcagatcaagaaattgaaacaagaccaaaaggctaatggagaaagacgtaacttcggggtaagccaagaaagaaatccaggtgaaagcagtcaaccaaatgtctccgatttgagtgataagaaagaatctgtgagttctgtagcccaagaaaatgcagttaaagatttcaccagtttttcaacacataactgcagtgggcctgaaaatccagagcttcagattctgaatgagcaggaggggaaaagtgctaattaccatgacaagaacattgtattacttaaaaacaaggcagtgctaatgcctaatggtgctacagtttctgcctcttccgtggaacacacacatggtgaactcctggaaaaaacactgtctcaatattatccagattgtgtttccattgcggtgcagaaaaccacatctcacataaatgccattaacagtcaggctactaatgagttgtcctgtgagatcactcacccatcgcatacctcagggcagatcaattccgcacagacctctaactctgagctgcctccaaagccagctgcagtggtgagtgaggcctgtgatgctgatgatgctgataatgccagtaaactagctgcaatgctaaatacctgttcctttcagaaaccagaacaactacaacaacaaaaatcagtttttgagatatgcccatctcctgcagaaaataacatccagggaaccacaaagctagcgtctggtgaagaattctgttcaggttccagcagcaatttgcaagctcctggtggcagctctgaacggtatttaaaacaaaatgaaatgaatggtgcttacttcaagcaaagctcagtgttcactaaggattccttttctgccactaccacaccaccaccaccatcacaattgcttctttctccccctcctcctcttccacaggttcctcagcttccttcagaaggaaaaagcactctgaatggtggagttttagaagaacaccaccactaccccaaccaaagtaacacaacacttttaagggaagtgaaaatagagggtaaacctgaggcaccaccttcccagagtcctaatccatctacacatgtatgcagcccttctccgatgctttctgaaaggcctcagaataattgtgtgaacaggaatgacatacagactgcagggacaatgactgttccattgtgttctgagaaaacaagaccaatgtcagaacacctcaagcataacccaccaatttttggtagcagtggagagctacaggacaactgccagcagttgatgagaaacaaagagcaagagattctgaagggtcgagacaaggagcaaacacgagatcttgtgcccccaacacagcactatctgaaaccaggatggattgaattgaaggcccctcgttttcaccaagcggaatcccatctaaaacgtaatgaggcatcactgccatcaattcttcagtatcaacccaatctctccaatcaaatgacctccaaacaatacactggaaattccaacatgcctggggggctcccaaggcaagcttacacccagaaaacaacacagctggagcacaagtcacaaatgtaccaagttgaaatgaatcaagggcagtcccaaggtacagtggaccaacatctccagttccaaaaaccctcacaccaggtgcacttctccaaaacagaccatttaccaaaagctcatgtgcagtcactgtgtggcactagatttcattttcaacaaagagcagattcccaaactgaaaaacttatgtccccagtgttgaaacagcacttgaatcaacaggcttcagagactgagccattttcaaactcacaccttttgcaacataagcctcataaacaggcagcacaaacacaaccatcccagagttcacatctccctcaaaaccagcaacagcagcaaaaattacaaataaagaataaagaggaaatactccagacttttcctcacccccaaagcaacaatgatcagcaaagagaaggatcattctttggccagactaaagtggaagaatgttttcatggtgaaaatcagtattcaaaatcaagcgagttcgagactcataatgtccaaatgggactggaggaagtacagaatataaatcgtagaaattccccttatagtcagaccatgaaatcaagtgcatgcaaaatacaggtttcttgttcaaacaatacacacctagtttcagagaataaagaacagactacacatcctgaactttttgcaggaaacaagacccaaaacttgcatcacatgcaatattttccaaataatgtgatcccaaagcaagatcttcttcacaggtgctttcaagaacaggagcagaagtcacaacaagcttcagttctacagggatataaaaatagaaaccaagatatgtctggtcaacaagctgcgcaacttgctcagcaaaggtacttgatacataaccatgcaaatgtttttcctgtgcctgaccagggaggaagtcacactcagacccctccccagaaggacactcaaaagcatgctgctctaaggtggcatctcttacagaagcaagaacagcagcaaacacagcaaccccaaactgagtcttgccatagtcagatgcacaggccaattaaggtggaacctggatgcaagccacatgcctgtatgcacacagcaccaccagaaaacaaaacatggaaaaaggtaactaagcaagagaatccacctgcaagctgtgataatgtgcagcaaaagagcatcattgagaccatggagcagcatctgaagcagtttcacgccaagtcgttatttgaccataaggctcttactctcaaatcacagaagcaagtaaaagttgaaatgtcagggccagtcacagttttgactagacaaaccactgctgcagaacttgatagccacaccccagctttagagcagcaaacaacttcttcagaaaagacaccaaccaaaagaacagctgcttctgttctcaataattttatagagtcaccttccaaattactagatactcctataaaaaatttattggatacacctgtcaagactcaatatgatttcccatcttgcagatgtgtagagcaaattattgaaaaagatgaaggtcctttttatacccatctaggagcaggtcctaatgtggcagctattagagaaatcatggaagaaaggtttggacagaagggtaaagctattaggattgaaagagtcatctatactggtaaagaaggcaaaagttctcagggatgtcctattgctaagtgggtggttcgcagaagcagcagtgaagagaagctactgtgtttggtgcgggagcgagctggccacacctgtgaggctgcagtgattgtgattctcatcctggtgtgggaaggaatcccgctgtctctggctgacaaactctactcggagcttaccgagacgctgaggaaatacggcacgctcaccaatcgccggtgtgccttgaatgaagagagaacttgcgcctgtcaggggctggatccagaaacctgtggtgcctccttctcttttggttgttcatggagcatgtactacaatggatgtaagtttgccagaagcaagatcccaaggaagtttaagctgcttggggatgacccaaaagaggaagagaaactggagtctcatttgcaaaacctgtccactcttatggcaccaacatataagaaacttgcacctgatgcatataataatcagattgaatatgaacacagagcaccagagtgccgtctgggtctgaaggaaggccgtccattctcaggggtcactgcatgtttggacttctgtgctcatgcccacagagacttgcacaacatgcagaatggcagcacattggtatgcactctcactagagaagacaatcgagaatttggaggaaaacctgaggatgagcagcttcacgttctgcctttatacaaagtctctgacgtggatgagtttgggagtgtggaagctcaggaggagaaaaaacggagtggtgccattcaggtactgagttcttttcggcgaaaagtcaggatgttagcagagccagtcaagacttgccgacaaaggaaactagaagccaagaaagctgcagctgaaaagctttcctccctggagaacagctcaaataaaaatgaaaaggaaaagtcagccccatcacgtacaaaacaaactgaaaacgcaagccaggctaaacagttggcagaacttttgcgactttcaggaccagtcatgcagcagtcccagcagccccagcctctacagaagcagccaccacagccccagcagcagcagagaccccagcagcagcagccacatcaccctcagacagagtctgtcaactcttattctgcttctggatccaccaatccatacatgagacggcccaatccagttagtccttatccaaactcttcacacacttcagatatctatggaagcaccagccctatgaacttctattccacctcatctcaagctgcaggttcatatttgaattcttctaatcccatgaacccttaccctgggcttttgaatcagaatacccaatatccatcatatcaatgcaatggaaacctatcagtggacaactgctccccatatctgggttcctattctccccagtctcagccgatggatctgtataggtatccaagccaagaccctctgtctaagctcagtctaccacccatccatacactttaccagccaaggtttggaaatagccagagttttacatctaaatacttaggttatggaaaccaaaatatgcagggagatggtttcagcagttgtaccattagaccaaatgtacatcatgtagggaaattgcctccttatcccactcatgagatggatggccacttcatgggagccacctctagattaccacccaatctgagcaatccaaacatggactataaaaatggtgaacatcattcaccttctcacataatccataactacagtgcagctccgggcatgttcaacagctctcttcatgccctgcatctccaaaacaaggagaatgacatgctttcccacacagctaatgggttatcaaagatgcttccagctcttaaccatgatagaactgcttgtgtccaaggaggcttacacaaattaagtgatgctaatggtcaggaaaagcagccattggcactagtccagggtgtggcttctggtgcagaggacaacgatgaggtctggtcagacagcgagcagagctttctggatcctgacattgggggagtggccgtggctccaactcatgggtcaattctcattgagtgtgcaaagcgtgagctgcatgccacaacccctttaaagaatcccaataggaatcaccccaccaggatctccctcgtcttttaccagcataagagcatgaatgagccaaaacatggcttggctctttgggaagccaaaatggctgaaaaagcccgtgagaaagaggaagagtgtgaaaagtatggcccagactatgtgcctcagaaatcccatggcaaaaaagtgaaacgggagcctgctgagccacatgaaacttcagagcccacttacctgcgtttcatcaagtctcttgccgaaaggaccatgtccgtgaccacagactccacagtaactacatctccatatgccttcactcgggtcacagggccttacaacagatatatatgatatcacccccttttgttggttacctcacttgaaaagaccacaaccaacctgtcagtagtatagttctcatgacgtgggcagtggggaaaggtcacagtattcatgacaaatgtggtgggaaaaacctcagctcaccagcaacaaaagaggttatcttaccatagcacttaattttcactggctcccaagtggtcacagatggcatctaggaaaagaccaaagcattctatgcaaaaagaaggtggggaagaaagtgttccgcaatttacatttttaaacactggttctattattggacgagatgatatgtaaatgtgatcccccccccccgcttacaactctacacatctgtgaccacttttaataatatcaagtttgcatagtcatggaacacaaatcaaacaagtactgtagtattacagtgacaggaatcttaaaataccatctggtgctgaatatatgatgtactgaaatactggaattatggctttttgaaatgcagtttttactgtaatcttaacttttatttatcaaaatagctacaggaaacatgaatagcaggaaaacactgaatttgtttggatgttctaagaaatggtgctaagaaaatggtgtctttaatagctaaaaatttaatgcctttatatcatcaagatgctatcagtgtactccagtgcccttgaataataggggtaccttttcattcaagtttttatcataattacctattcttacacaagcttagtttttaaaatgtggacattttaaaggcctctggattttgctcatccagtgaagtccttgtaggacaataaacgtatatatgtacatatatacacaaacatgtatatgtgcacacacatgtatatgtataaatattttaaatggtgttttagaagcactttgtctacctaagctttgacaacttgaacaatgctaaggtactgagatgtttaaaaaacaagtttactttcattttagaatgcaaagttgatttttttaaggaaacaaagaaagcttttaaaatatttttgcttttagccatgcatctgctgatgagcaattgtgtccatttttaacacagccagttaaatccaccatggggcttactggattcaagggaatacgttagtccacaaaacatgttttctggtgctcatctcacatgctatactgtaaaacagttttatacaaaattgtatgacaagttcattgctcaaaaatgtacagttttaagaattttctattaactgcaggtaataattagctgcatgctgcagactcaacaaagctagttcactgaagcctatgctattttatggatcataggctcttcagagaactgaatggcagtctgcctttgtgttgataattatgtacattgtgacgttgtcatttcttagcttaagtgtcctctttaacaagaggattgagcagactgatgcctgcataagatgaataaacagggttagttccatgtgaatctgtcagttaaaaagaaacaaaaacaggcagctggtttgctgtggtggttttaaatcattaatttgtataaagaagtgaaagagttgtatagtaaattaaattgtaaacaaaacttttttaatgcaatgctttagtattttagtactgtaaaaaaattaaatatatacatatatatatatatatatatatatatatatatgagtttgaagcagaattcacatcatgatggtgctactcagcctgctacaaatatatcataatgtgagctaagaattcattaaatgtttgagtgatgttcctacttgtcatatacctcaacactagtttggcaataggatattgaactgagagtgaaagcattgtgtaccatcatttttttccaagtccttttttttattgttaaaaaaaaaagcataccttttttcaatacttgatttcttagcaagtataacttgaacttcaacctttttgttctaaaaattcagggatatttcagctcatgctctccctatgccaacatgtcacctgtgtttatgtaaaattgttgtaggttaataaatatattctttgtcagggatttaacccttttattttgaatcccttctattttacttgtacatgtgctgatgtaactaaaactaattttgtaaatctgttggctctttttattgtaaagaaaagcattttaaaagtttgaggaatcttttgactgtttcaagcaggaaaaaaaaattacatgaaaatagaatgcactgagttgataaagggaaaaattgtaaggcaggagtttggcaagtggctgttggccagagacttacttgtaactctctaaatgaagtttttttgatcctgtaatcactgaaggtacatactccatgtggacttcccttaaacaggcaaacacctacaggtatggtgtgcaacagattgtacaattacattttggcctaaatacatttttgcttactagtatttaaaataaattcttaatcagaggaggcctttgggttttattggtcaaatctttgtaagctggcttttgtctttttaaaaaatttcttgaatttgtggttgtgtccaatttgcaaacatttccaaaaatgtttgctttgcttacaaaccacatgattttaatgttttttgtataccataatatctagccccaaacatttgattactacatgtgcattggtgattttgatcatccattcttaatatttgatttctgtgtcacctactgtcatttgttaaactgctggccaacaagaacaggaagtatagtttggggggttggggagagtttacataaggaagagaagaaattgagtggcatattgtaaatatcagatctataattgtaaatataaaacctgcctcagttagaatgaatggaaagcagatctacaatttgctaatataggaatatcaggttgactatatagccatacttgaaaatgcttctgagtggtgtcaactttacttgaatgaatttttcatcttgattgacgcacagtgatgtacagttcacttctgaagctagtggttaacttgtgtaggaaacttttgcagtttgacactaagataacttctgtgtgcatttttctatgcttttttaaaaactagtttcatttcattttcatgagatgtttggtttataagatctgaggatggttataaatactgtaagtattgtaatgttatgaatgcaggttatttgaaagctgtttattattatatcattcctgataatgctatgtgagtgtttttaataaaatttatatttatttaatgcactctaa

SEQ ID NO: 953 - DNA, 9289 bp, Homo sapiens
  source 1..9289: mol_type = other DNA
gtagagaagcagaaggaagcaagatggctgccctttaggatttgttagaaaggagacccgactgcaactgctggattgctgcaaggctgagggacgagaacgaggctggcaaacattcagcagcacaccctctcaagattgtttacttgcctttgctcctgttgagttacaacgcttggaagcaggagatgggctcagcagcagccaataggacatgatccaggaagagcagtaagggactgagctgctgaattcaactagagggcagccttgtggatggccccgaagcaagcctgatggaacaggatagaaccaaccatgttgagggcaacagactaagtccattcctgataccatcacctcccatttgccagacagaacctctggctacaaagctccagaatggaagcccactgcctgagagagctcatccagaagtaaatggagacaccaagtggcactctttcaaaagttattatggaataccctgtatgaagggaagccagaatagtcgtgtgagtcctgactttacacaagaaagtagagggtattccaagtgtttgcaaaatggaggaataaaacgcacagttagtgaaccttctctctctgggctccttcagatcaagaaattgaaacaagaccaaaaggctaatggagaaagacgtaacttcggggtaagccaagaaagaaatccaggtgaaagcagtcaaccaaatgtctccgatttgagtgataagaaagaatctgtgagttctgtagcccaagaaaatgcagttaaagatttcaccagtttttcaacacataactgcagtgggcctgaaaatccagagcttcagattctgaatgagcaggaggggaaaagtgctaattaccatgacaagaacattgtattacttaaaaacaaggcagtgctaatgcctaatggtgctacagtttctgcctcttccgtggaacacacacatggtgaactcctggaaaaaacactgtctcaatattatccagattgtgtttccattgcggtgcagaaaaccacatctcacataaatgccattaacagtcaggctactaatgagttgtcctgtgagatcactcacccatcgcatacctcagggcagatcaattccgcacagacctctaactctgagctgcctccaaagccagctgcagtggtgagtgaggcctgtgatgctgatgatgctgataatgccagtaaactagctgcaatgctaaatacctgttcctttcagaaaccagaacaactacaacaacaaaaatcagtttttgagatatgcccatctcctgcagaaaataacatccagggaaccacaaagctagcgtctggtgaagaattctgttcaggttccagcagcaatttgcaagctcctggtggcagctctgaacggtatttaaaacaaaatgaaatgaatggtgcttacttcaagcaaagctcagtgttcactaaggattccttttctgccactaccacaccaccaccaccatcacaattgcttctttctccccctcctcctcttccacaggttcctcagcttccttcagaaggaaaaagcactctgaatggtggagttttagaagaacaccaccactaccccaaccaaagtaacacaacacttttaagggaagtgaaaatagagggtaaacctgaggcaccaccttcccagagtcctaatccatctacacatgtatgcagcccttctccgatgctttctgaaaggcctcagaataattgtgtgaacaggaatgacatacagactgcagggacaatgactgttccattgtgttctgagaaaacaagaccaatgtcagaacacctcaagcataacccaccaatttttggtagcagtggagagctacaggacaactgccagcagttgatgagaaacaaagagcaagagattctgaagggtcgagacaaggagcaaacacgagatcttgtgcccccaacacagcactatctgaaaccaggatggattgaattgaaggcccctcgttttcaccaagcggaatcccatctaaaacgtaatgaggcatcactgccatcaattcttcagtatcaacccaatctctccaatcaaatgacctccaaacaatacactggaaattccaacatgcctggggggctcccaaggcaagcttacacccagaaaacaacacagctggagcacaagtcacaaatgtaccaagttgaaatgaatcaagggcagtcccaaggtacagtggaccaacatctccagttccaaaaaccctcacaccaggtgcacttctccaaaacagaccatttaccaaaagctcatgtgcagtcactgtgtggcactagatttcattttcaacaaagagcagattcccaaactgaaaaacttatgtccccagtgttgaaacagcacttgaatcaacaggcttcagagactgagccattttcaaactcacaccttttgcaacataagcctcataaacaggcagcacaaacacaaccatcccagagttcacatctccctcaaaaccagcaacagcagcaaaaattacaaataaagaataaagaggaaatactccagacttttcctcacccccaaagcaacaatgatcagcaaagagaaggatcattctttggccagactaaagtggaagaatgttttcatggtgaaaatcagtattcaaaatcaagcgagttcgagactcataatgtccaaatgggactggaggaagtacagaatataaatcgtagaaattccccttatagtcagaccatgaaatcaagtgcatgcaaaatacaggtttcttgttcaaacaatacacacctagtttcagagaataaagaacagactacacatcctgaactttttgcaggaaacaagacccaaaacttgcatcacatgcaatattttccaaataatgtgatcccaaagcaagatcttcttcacaggtgctttcaagaacaggagcagaagtcacaacaagcttcagttctacagggatataaaaatagaaaccaagatatgtctggtcaacaagctgcgcaacttgctcagcaaaggtacttgatacataaccatgcaaatgtttttcctgtgcctgaccagggaggaagtcacactcagacccctccccagaaggacactcaaaagcatgctgctctaaggtggcatctcttacagaagcaagaacagcagcaaacacagcaaccccaaactgagtcttgccatagtcagatgcacaggccaattaaggtggaacctggatgcaagccacatgcctgtatgcacacagcaccaccagaaaacaaaacatggaaaaaggtaactaagcaagagaatccacctgcaagctgtgataatgtgcagcaaaagagcatcattgagaccatggagcagcatctgaagcagtttcacgccaagtcgttatttgaccataaggctcttactctcaaatcacagaagcaagtaaaagttgaaatgtcagggccagtcacagttttgactagacaaaccactgctgcagaacttgatagccacaccccagctttagagcagcaaacaacttcttcagaaaagacaccaaccaaaagaacagctgcttctgttctcaataattttatagagtcaccttccaaattactagatactcctataaaaaatttattggatacacctgtcaagactcaatatgatttcccatcttgcagatgtgtaggtttggacagaagggtaaagctattaggattgaaagagtcatctatactggtaaagaaggcaaaagttctcagggatgtcctattgctaagtgggagaacttgcgcctgtcaggggctggatccagaaacctgtggtgcctccttctcttttggttgttcatggagcatgtactacaatggatgtaagtttgccagaagcaagatcccaaggaagtttaagctgcttggggatgacccaaaagaggaagagaaactggagtctcatttgcaaaacctgtccactcttatggcaccaacatataagaaacttgcacctgatgcatataataatcagattgaatatgaacacagagcaccagagtgccgtctgggtctgaaggaaggccgtccattctcaggggtcactgcatgtttggacttctgtgctcatgcccacagagacttgcacaacatgcagaatggcagcacattggtatgcactctcactagagaagacaatcgagaatttggaggaaaacctgaggatgagcagcttcacgttctgcctttatacaaagtctctgacgtggatgagtttgggagtgtggaagctcaggaggagaaaaaacggagtggtgccattcaggtactgagttcttttcggcgaaaagtcaggatgttagcagagccagtcaagacttgccgacaaaggaaactagaagccaagaaagctgcagctgaaaagctttcctccctggagaacagctcaaataaaaatgaaaaggaaaagtcagccccatcacgtacaaaacaaactgaaaacgcaagccaggctaaacagttggcagaacttttgcgactttcaggaccagtcatgcagcagtcccagcagccccagcctctacagaagcagccaccacagccccagcagcagcagagaccccagcagcagcagccacatcaccctcagacagagtctgtcaactcttattctgcttctggatccaccaatccatacatgagacggcccaatccagttagtccttatccaaactcttcacacacttcagatatctatggaagcaccagccctatgaacttctattccacctcatctcaagctgcaggttcatatttgaattcttctaatcccatgaacccttaccctgggcttttgaatcagaatacccaatatccatcatatcaatgcaatggaaacctatcagtggacaactgctccccatatctgggttcctattctccccagtctcagccgatggatctgtataggtatccaagccaagaccctctgtctaagctcagtctaccacccatccatacactttaccagccaaggtttggaaatagccagagttttacatctaaatacttaggttatggaaaccaaaatatgcagggagatggtttcagcagttgtaccattagaccaaatgtacatcatgtagggaaattgcctccttatcccactcatgagatggatggccacttcatgggagccacctctagattaccacccaatctgagcaatccaaacatggactataaaaatggtgaacatcattcaccttctcacataatccataactacagtgcagctccgggcatgttcaacagctctcttcatgccctgcatctccaaaacaaggagaatgacatgctttcccacacagctaatgggttatcaaagatgcttccagctcttaaccatgatagaactgcttgtgtccaaggaggcttacacaaattaagtgatgctaatggtcaggaaaagcagccattggcactagtccagggtgtggcttctggtgcagaggacaacgatgaggtctggtcagacagcgagcagagctttctggatcctgacattgggggagtggccgtggctccaactcatgggtcaattctcattgagtgtgcaaagcgtgagctgcatgccacaacccctttaaagaatcccaataggaatcaccccaccaggatctccctcgtcttttaccagcataagagcatgaatgagccaaaacatggcttggctctttgggaagccaaaatggctgaaaaagcccgtgagaaagaggaagagtgtgaaaagtatggcccagactatgtgcctcagaaatcccatggcaaaaaagtgaaacgggagcctgctgagccacatgaaacttcagagcccacttacctgcgtttcatcaagtctcttgccgaaaggaccatgtccgtgaccacagactccacagtaactacatctccatatgccttcactcgggtcacagggccttacaacagatatatatgatatcacccccttttgttggttacctcacttgaaaagaccacaaccaacctgtcagtagtatagttctcatgacgtgggcagtggggaaaggtcacagtattcatgacaaatgtggtgggaaaaacctcagctcaccagcaacaaaagaggttatcttaccatagcacttaattttcactggctcccaagtggtcacagatggcatctaggaaaagaccaaagcattctatgcaaaaagaaggtggggaagaaagtgttccgcaatttacatttttaaacactggttctattattggacgagatgatatgtaaatgtgatcccccccccccgcttacaactctacacatctgtgaccacttttaataatatcaagtttgcatagtcatggaacacaaatcaaacaagtactgtagtattacagtgacaggaatcttaaaataccatctggtgctgaatatatgatgtactgaaatactggaattatggctttttgaaatgcagtttttactgtaatcttaacttttatttatcaaaatagctacaggaaacatgaatagcaggaaaacactgaatttgtttggatgttctaagaaatggtgctaagaaaatggtgtctttaatagctaaaaatttaatgcctttatatcatcaagatgctatcagtgtactccagtgcccttgaataataggggtaccttttcattcaagtttttatcataattacctattcttacacaagcttagtttttaaaatgtggacattttaaaggcctctggattttgctcatccagtgaagtccttgtaggacaataaacgtatatatgtacatatatacacaaacatgtatatgtgcacacacatgtatatgtataaatattttaaatggtgttttagaagcactttgtctacctaagctttgacaacttgaacaatgctaaggtactgagatgtttaaaaaacaagtttactttcattttagaatgcaaagttgatttttttaaggaaacaaagaaagcttttaaaatatttttgcttttagccatgcatctgctgatgagcaattgtgtccatttttaacacagccagttaaatccaccatggggcttactggattcaagggaatacgttagtccacaaaacatgttttctggtgctcatctcacatgctatactgtaaaacagttttatacaaaattgtatgacaagttcattgctcaaaaatgtacagttttaagaattttctattaactgcaggtaataattagctgcatgctgcagactcaacaaagctagttcactgaagcctatgctattttatggatcataggctcttcagagaactgaatggcagtctgcctttgtgttgataattatgtacattgtgacgttgtcatttcttagcttaagtgtcctctttaacaagaggattgagcagactgatgcctgcataagatgaataaacagggttagttccatgtgaatctgtcagttaaaaagaaacaaaaacaggcagctggtttgctgtggtggttttaaatcattaatttgtataaagaagtgaaagagttgtatagtaaattaaattgtaaacaaaacttttttaatgcaatgctttagtattttagtactgtaaaaaaattaaatatatacatatatatatatatatatatatatatatatatgagtttgaagcagaattcacatcatgatggtgctactcagcctgctacaaatatatcataatgtgagctaagaattcattaaatgtttgagtgatgttcctacttgtcatatacctcaacactagtttggcaataggatattgaactgagagtgaaagcattgtgtaccatcatttttttccaagtccttttttttattgttaaaaaaaaaagcataccttttttcaatacttgatttcttagcaagtataacttgaacttcaacctttttgttctaaaaattcagggatatttcagctcatgctctccctatgccaacatgtcacctgtgtttatgtaaaattgttgtaggttaataaatatattctttgtcagggatttaacccttttattttgaatcccttctattttacttgtacatgtgctgatgtaactaaaactaattttgtaaatctgttggctctttttattgtaaagaaaagcattttaaaagtttgaggaatcttttgactgtttcaagcaggaaaaaaaaattacatgaaaatagaatgcactgagttgataaagggaaaaattgtaaggcaggagtttggcaagtggctgttggccagagacttacttgtaactctctaaatgaagtttttttgatcctgtaatcactgaaggtacatactccatgtggacttcccttaaacaggcaaacacctacaggtatggtgtgcaacagattgtacaattacattttggcctaaatacatttttgcttactagtatttaaaataaattcttaatcagaggaggcctttgggttttattggtcaaatctttgtaagctggcttttgtctttttaaaaaatttcttgaatttgtggttgtgtccaatttgcaaacatttccaaaaatgtttgctttgcttacaaaccacatgattttaatgttttttgtataccataatatctagccccaaacatttgattactacatgtgcattggtgattttgatcatccattcttaatatttgatttctgtgtcacctactgtcatttgttaaactgctggccaacaagaacaggaagtatagtttggggggttggggagagtttacataaggaagagaagaaattgagtggcatattgtaaatatcagatctataattgtaaatataaaacctgcctcagttagaatgaatggaaagcagatctacaatttgctaatataggaatatcaggttgactatatagccatacttgaaaatgcttctgagtggtgtcaactttacttgaatgaatttttcatcttgattgacgcacagtgatgtacagttcacttctgaagctagtggttaacttgtgtaggaaacttttgcagtttgacactaagataacttctgtgtgcatttttctatgcttttttaaaaactagtttcatttcattttcatgagatgtttggtttataagatctgaggatggttataaatactgtaagtattgtaatgttatgaatgcaggttatttgaaagctgtttattattatatcattcctgataatgctatgtgagtgtttttaataaaatttatatttatttaatgcactctaa

SEQ ID NO: 954 - DNA, 9236 bp, Homo sapiens
  source 1..9236: mol_type = other DNA
aaacagaaggtgggccggggcggggagaaacagaactcggtcaatttcccagtttgtcgggtctttaaaaatacaggcccctaaagcactaagggcatgccctcggtgaaacaggggagcgcttctgctgaatgagattaaagcgacagaaaagggaaaggagagcgcgggcaacgggatctaaagggagatagagacgcgggcctctgagggctggcaaacattcagcagcacaccctctcaagattgtttacttgcctttgctcctgttgagttacaacgcttggaagcaggagatgggctcagcagcagccaataggacatgatccaggaagagcagtaagggactgagctgctgaattcaactagagggcagccttgtggatggccccgaagcaagcctgatggaacaggatagaaccaaccatgttgagggcaacagactaagtccattcctgataccatcacctcccatttgccagacagaacctctggctacaaagctccagaatggaagcccactgcctgagagagctcatccagaagtaaatggagacaccaagtggcactctttcaaaagttattatggaataccctgtatgaagggaagccagaatagtcgtgtgagtcctgactttacacaagaaagtagagggtattccaagtgtttgcaaaatggaggaataaaacgcacagttagtgaaccttctctctctgggctccttcagatcaagaaattgaaacaagaccaaaaggctaatggagaaagacgtaacttcggggtaagccaagaaagaaatccaggtgaaagcagtcaaccaaatgtctccgatttgagtgataagaaagaatctgtgagttctgtagcccaagaaaatgcagttaaagatttcaccagtttttcaacacataactgcagtgggcctgaaaatccagagcttcagattctgaatgagcaggaggggaaaagtgctaattaccatgacaagaacattgtattacttaaaaacaaggcagtgctaatgcctaatggtgctacagtttctgcctcttccgtggaacacacacatggtgaactcctggaaaaaacactgtctcaatattatccagattgtgtttccattgcggtgcagaaaaccacatctcacataaatgccattaacagtcaggctactaatgagttgtcctgtgagatcactcacccatcgcatacctcagggcagatcaattccgcacagacctctaactctgagctgcctccaaagccagctgcagtggtgagtgaggcctgtgatgctgatgatgctgataatgccagtaaactagctgcaatgctaaatacctgttcctttcagaaaccagaacaactacaacaacaaaaatcagtttttgagatatgcccatctcctgcagaaaataacatccagggaaccacaaagctagcgtctggtgaagaattctgttcaggttccagcagcaatttgcaagctcctggtggcagctctgaacggtatttaaaacaaaatgaaatgaatggtgcttacttcaagcaaagctcagtgttcactaaggattccttttctgccactaccacaccaccaccaccatcacaattgcttctttctccccctcctcctcttccacaggttcctcagcttccttcagaaggaaaaagcactctgaatggtggagttttagaagaacaccaccactaccccaaccaaagtaacacaacacttttaagggaagtgaaaatagagggtaaacctgaggcaccaccttcccagagtcctaatccatctacacatgtatgcagcccttctccgatgctttctgaaaggcctcagaataattgtgtgaacaggaatgacatacagactgcagggacaatgactgttccattgtgttctgagaaaacaagaccaatgtcagaacacctcaagcataacccaccaatttttggtagcagtggagagctacaggacaactgccagcagttgatgagaaacaaagagcaagagattctgaagggtcgagacaaggagcaaacacgagatcttgtgcccccaacacagcactatctgaaaccaggatggattgaattgaaggcccctcgttttcaccaagcggaatcccatctaaaacgtaatgaggcatcactgccatcaattcttcagtatcaacccaatctctccaatcaaatgacctccaaacaatacactggaaattccaacatgcctggggggctcccaaggcaagcttacacccagaaaacaacacagctggagcacaagtcacaaatgtaccaagttgaaatgaatcaagggcagtcccaaggtacagtggaccaacatctccagttccaaaaaccctcacaccaggtgcacttctccaaaacagaccatttaccaaaagctcatgtgcagtcactgtgtggcactagatttcattttcaacaaagagcagattcccaaactgaaaaacttatgtccccagtgttgaaacagcacttgaatcaacaggcttcagagactgagccattttcaaactcacaccttttgcaacataagcctcataaacaggcagcacaaacacaaccatcccagagttcacatctccctcaaaaccagcaacagcagcaaaaattacaaataaagaataaagaggaaatactccagacttttcctcacccccaaagcaacaatgatcagcaaagagaaggatcattctttggccagactaaagtggaagaatgttttcatggtgaaaatcagtattcaaaatcaagcgagttcgagactcataatgtccaaatgggactggaggaagtacagaatataaatcgtagaaattccccttatagtcagaccatgaaatcaagtgcatgcaaaatacaggtttcttgttcaaacaatacacacctagtttcagagaataaagaacagactacacatcctgaactttttgcaggaaacaagacccaaaacttgcatcacatgcaatattttccaaataatgtgatcccaaagcaagatcttcttcacaggtgctttcaagaacaggagcagaagtcacaacaagcttcagttctacagggatataaaaatagaaaccaagatatgtctggtcaacaagctgcgcaacttgctcagcaaaggtacttgatacataaccatgcaaatgtttttcctgtgcctgaccagggaggaagtcacactcagacccctccccagaaggacactcaaaagcatgctgctctaaggtggcatctcttacagaagcaagaacagcagcaaacacagcaaccccaaactgagtcttgccatagtcagatgcacaggccaattaaggtggaacctggatgcaagccacatgcctgtatgcacacagcaccaccagaaaacaaaacatggaaaaaggtaactaagcaagagaatccacctgcaagctgtgataatgtgcagcaaaagagcatcattgagaccatggagcagcatctgaagcagtttcacgccaagtcgttatttgaccataaggctcttactctcaaatcacagaagcaagtaaaagttgaaatgtcagggccagtcacagttttgactagacaaaccactgctgcagaacttgatagccacaccccagctttagagcagcaaacaacttcttcagaaaagacaccaaccaaaagaacagctgcttctgttctcaataattttatagagtcaccttccaaattactagatactcctataaaaaatttattggatacacctgtcaagactcaatatgatttcccatcttgcagatgtgtaggtaagtgccagaaatgtactgagacacatggcgtttatccagaattagcaaatttatcttcagatatgggattttccttctttttttaaatcttgagtctggcagcaatttgtaaaggctcataaaaatctgaagcttacattttttgtcaagttaccgatgcttgtgtcttgtgaaagagaacttcacttacatgcagtttttccaaaagaattaaataatcgtgcatgtttatttttccctctcttcagatcctgtaaaatttgaatgtatctgttttagatcaattcgcctatttagctctttgtatattatctcctggagagacagctaggcagcaaaaaaacaatctattaaaatgagaaaataacgaccataggcagtctaatgtacgaactttaaatattttttaattcaaggtaaaatatattagtttcacaagatttctggctaatagggaaattattatcttcagtcttcatgagttgggggaaatgataatgctgacactcttagtgctcctaaagtttccttttctccatttatacatttggaatgttgtgatttatattcattttgattcccttttctctaaaatttcatctttttgattaaaaaatatgatacaggcatacctcagagatattgtgggtttggctccataccacaataaaatgaatattacaataaagcaagttgtaaggactttttggtttctcactgtatgtaaaagttatttatatactatactgtaacatactaagtgtgcaatagcattgtgtctaaaaaatatatactttaaaaataatttattgttaaaaaaatgccaacaattatctgggcctttagtgagtgctaatctttttgctggtggagggtcgtgcttcagtattgatcgctgtggactgatcatggtggtagttgctgaaggttgctgggatggctgtgtgtgtggcaatttcttaaaataagacaacagtgaagtgctgtatcaattgatttttccattcacaaaagatttctctgtagcatgcaatgctgtttgatagcatttaacccacagcagaatttctttgaaaattggactcagtcctctcaaactgtgctgctgctttatcaactaagtttttgtaattttctgaatcctttgttgtcatttcagcagtttacagcatcttcattggaagtatattccatctcaaacattctttgttcatccataagaagcaacttcttatcaagttttttcatgacattgcagtaactcagccccatcttcaggctctacttctaattctggttctcttgctacatctccctcatctgcagtgacctctccacggaagtcttgaactcctcaaagtaatccatgagggttggaatcaacttctaaactcctgttaatgttgatatattgaccccctcccatgaattatgaatgttcttaataacttctaaatggtgatacctttccagaaggctttcaatgtactttgcccggatccatcagaagactatcttggcagctgtagactaacaatatatttcttaaatgataagacttgaaagtcaaaagtactccttaatccataggctgcagaatcaatgttgtattaacaggcacgaaaacagcattaatcttgtgcatctccatcggagctcttgggtgactaggtgccttgagcagtaatattttgaaaggaggttttggttttgttttttgttttttttttttgttttttagcagtaagtctcaacactgggcttaaaatattcagtaaactatgttgtaaaaagatgtgttatcatccagactttgttgttccattactctacacaagcagggtacacttagcataattcttaagggccttggaattttcagaatggtaaatgagtatgggcttcaacttaaaatcatcaactgcattagcctgtaacaagagagtcagcctgtcctttgaagcaaggcattgacttctatctatgaaagtcttagatggcaccttgtttcaatagtaggctgtttagtacagccaccttcatcagtgatcttagctagatcttctgcataacttgctgcagcttctacatcagcacttgctgcctcaccttgtccttttatgttatagagacagctgcgcttcttaaactttataaaccaacttctgctagcttccaacttctcttctgcagcttcctcattctcttcatagaactgaagggagtcaaggccttgctctggattaagctttggcttaaggaatgttgtggctgacgtgatcttctatccagaccactaaagcgctctccatatcagcaataaggccgttttgctttcttacctttcatgtgttcactggagtaatttccttcaagaatttttcctttacattcacaacttggctaactggcatgcaaggcctagctttcagcctgtcttggcttttgacatgccttcctcacttagctcgtcatatctagcttttgatttaaagtggcaggcatacaactcttcctttcacttgaacacttagaggccactgtagggttattaattggcctaatttcaatattgttgtgttttagggaatagagaggcccagggagagggagagagcccaaacggctggttgatagagcaggcagaatgcacacaacatttatcagattatgtttgcaccatttaccagattatgggtacggtttgtggcaccccccaaaaattagaatagtaacatcaaagatcactgatcacagatcgccataacataaataataataaactttaaaatactgtgagaattaccaaaatgtgatacagagacatgaagtgagcacatgctgttgaaaaaaatgacactgatagacatacttaacacgtgggattgccacaaaccttcagtttgtaaaagtcacagtaactgtgactcacaaaagaacaaagcacaataaaacgaggtatgcctgtatttttaaaaaaagctttttgttaaaattcaggatatgtaataggtctgtaggaatagtgaaatatttttgctgatggatgtagatatatacgtggatagagatgaagatcttaattatagctatgcagcatagatttagtcaaagacatttgaaaagacaaatgttaaattagtgtggctaatgacctacccgtgccatgttttccctcttgcaatgagataccccacactgtgtagaaggatggagggaggactcctactgtccctctttgcgtgtggttattaagttgcctcactgggctaaaacaccacacatctcatagataatatttggtaagttgtaatcgtcttcactcttctcttatcacccacccctatcttcccacttttccatctttgttggtttgcaacagccccttctttttgcctgactctccaggattttctctcatcataaattgttctaaagtacatactaatatgggtctggattgactattcttatttgcaaaacagcaattaaatgttatagggaagtaggaagaaaaaggggtatccttgacaataaaccaagcaatattctgggggtgggatagagcaggaaattttatttttaatcttttaaaatccaagtaataggtaggcttccagttagctttaaatgttttttttttccagctcaaaaaattggattgtagttgatactacatataatacattctaattccctcactgtattctttgtttagtttcatttatttggtttaaaataattttttatcccatatctgaaatgtaatatatttttatccaacaaccagcatgtacatatacttaattatgtggcacattttctaatagatcagtccatcaatctactcattttaaagaaaaaaaaattttaaagtcacttttagagcccttaatgtgtagttgggggttaagctttgtggatgtagcctttatatttagtataattgaggtctaaaataataatcttctattatctcaacagagcaaattattgaaaaagatgaaggtcctttttatacccatctaggagcaggtcctaatgtggcagctattagagaaatcatggaagaaaggtaattaacgcaaaggcacagggcagattaacgtttatccttttgtatatgtcagaatttttccagccttcacacacaaagcagtaaacaattgtaaattgagtaattattagtaggcttagctattctagggttgccaacactacacactgtgctattcaccagagagtcacaatatttgacaggactaatagtctgctagctggcacaggctgcccactttgcgatggatgccagaaaacccaggcatgaacaggaatcggccagccaggctgccagccacaaggtactggcacaggctccaacgagaggtcccactctggctttcccacctgataataaagtgtcaaagcagaaagactggtaaagtgtggtataagaaaagaaccactgaattaaattcacctagtgttgcaaatgagtacttatctctaagttttcttttaccataaaaagagagcaagtgtgatatgttgaatagaaagagaaacatactatttacagctgcctttttttttttttttcgctatcaatcacaggtatacaagtacttgcctttactcctgcatgtagaagactcttatgagcgagataatgcagagaaggcctttcatataaatttatacagctctgagctgttcttcttctagggtgccttttcattaagaggtaggcagtattattattaaagtacttaggatacattggggcagctaggacatattcagtatcattcttgctccatttccaaattattcatttctaaattagcatgtagaagttcactaaataatcatctagtggcctggcagaaatagtgaatttccctaagtgccttttttttgttgtttttttgttttgttttttaaacaagcagtaggtggtgctttggtcataagggaagatatagtctatttctaggactattccatattttccatgtggctggatactaactatttgccagcctccttttctaaattgtgagacattcttggaggaacagttctaactaaaatctattatgactccccaagttttaaaatagctaaatttagtaagggaaaaaatagtttatgttttagaagactgaacttagcaaactaacctgaattttgtgctttgtgaaattttatatcgaaatgagctttcccattttcacccacatgtaatttacaaaatagttcattacaattatctgtacattttgatattgaggaaaaacaaggcttaaaaaccattatccagtttgcttggcgtagacctgtttaaaaaataataaaccgttcatttctcaggatgtggtcatagaataaagttatgctcaaatgttcaaatatttaaa

SEQ ID NO: 955 - DNA, 5969 bp, Homo sapiens
  source 1..5969: mol_type = other DNA
tcaggctctacttctaattctggttctcttgctacatctccctcatctgcagtgacctctccacggaagtcttgaactcctcaaaagcaaattattgaaaaagatgaaggtcctttttatacccatctaggagcaggtcctaatgtggcagctattagagaaatcatggaagaaaggtttggacagaagggtaaagctattaggattgaaagagtcatctatactggtaaagaaggcaaaagttctcagggatgtcctattgctaagtgggtggttcgcagaagcagcagtgaagagaagctactgtgtttggtgcgggagcgagctggccacacctgtgaggctgcagtgattgtgattctcatcctggtgtgggaaggaatcccgctgtctctggctgacaaactctactcggagcttaccgagacgctgaggaaatacggcacgctcaccaatcgccggtgtgccttgaatgaagagagaacttgcgcctgtcaggggctggatccagaaacctgtggtgcctccttctcttttggttgttcatggagcatgtactacaatggatgtaagtttgccagaagcaagatcccaaggaagtttaagctgcttggggatgacccaaaagaggaagagaaactggagtctcatttgcaaaacctgtccactcttatggcaccaacatataagaaacttgcacctgatgcatataataatcagattgaatatgaacacagagcaccagagtgccgtctgggtctgaaggaaggccgtccattctcaggggtcactgcatgtttggacttctgtgctcatgcccacagagacttgcacaacatgcagaatggcagcacattggtatgcactctcactagagaagacaatcgagaatttggaggaaaacctgaggatgagcagcttcacgttctgcctttatacaaagtctctgacgtggatgagtttgggagtgtggaagctcaggaggagaaaaaacggagtggtgccattcaggtactgagttcttttcggcgaaaagtcaggatgttagcagagccagtcaagacttgccgacaaaggaaactagaagccaagaaagctgcagctgaaaagctttcctccctggagaacagctcaaataaaaatgaaaaggaaaagtcagccccatcacgtacaaaacaaactgaaaacgcaagccaggctaaacagttggcagaacttttgcgactttcaggaccagtcatgcagcagtcccagcagccccagcctctacagaagcagccaccacagccccagcagcagcagagaccccagcagcagcagccacatcaccctcagacagagtctgtcaactcttattctgcttctggatccaccaatccatacatgagacggcccaatccagttagtccttatccaaactcttcacacacttcagatatctatggaagcaccagccctatgaacttctattccacctcatctcaagctgcaggttcatatttgaattcttctaatcccatgaacccttaccctgggcttttgaatcagaatacccaatatccatcatatcaatgcaatggaaacctatcagtggacaactgctccccatatctgggttcctattctccccagtctcagccgatggatctgtataggtatccaagccaagaccctctgtctaagctcagtctaccacccatccatacactttaccagccaaggtttggaaatagccagagttttacatctaaatacttaggttatggaaaccaaaatatgcagggagatggtttcagcagttgtaccattagaccaaatgtacatcatgtagggaaattgcctccttatcccactcatgagatggatggccacttcatgggagccacctctagattaccacccaatctgagcaatccaaacatggactataaaaatggtgaacatcattcaccttctcacataatccataactacagtgcagctccgggcatgttcaacagctctcttcatgccctgcatctccaaaacaaggagaatgacatgctttcccacacagctaatgggttatcaaagatgcttccagctcttaaccatgatagaactgcttgtgtccaaggaggcttacacaaattaagtgatgctaatggtcaggaaaagcagccattggcactagtccagggtgtggcttctggtgcagaggacaacgatgaggtctggtcagacagcgagcagagctttctggatcctgacattgggggagtggccgtggctccaactcatgggtcaattctcattgagtgtgcaaagcgtgagctgcatgccacaacccctttaaagaatcccaataggaatcaccccaccaggatctccctcgtcttttaccagcataagagcatgaatgagccaaaacatggcttggctctttgggaagccaaaatggctgaaaaagcccgtgagaaagaggaagagtgtgaaaagtatggcccagactatgtgcctcagaaatcccatggcaaaaaagtgaaacgggagcctgctgagccacatgaaacttcagagcccacttacctgcgtttcatcaagtctcttgccgaaaggaccatgtccgtgaccacagactccacagtaactacatctccatatgccttcactcgggtcacagggccttacaacagatatatatgatatcacccccttttgttggttacctcacttgaaaagaccacaaccaacctgtcagtagtatagttctcatgacgtgggcagtggggaaaggtcacagtattcatgacaaatgtggtgggaaaaacctcagctcaccagcaacaaaagaggttatcttaccatagcacttaattttcactggctcccaagtggtcacagatggcatctaggaaaagaccaaagcattctatgcaaaaagaaggtggggaagaaagtgttccgcaatttacatttttaaacactggttctattattggacgagatgatatgtaaatgtgatcccccccccccgcttacaactctacacatctgtgaccacttttaataatatcaagtttgcatagtcatggaacacaaatcaaacaagtactgtagtattacagtgacaggaatcttaaaataccatctggtgctgaatatatgatgtactgaaatactggaattatggctttttgaaatgcagtttttactgtaatcttaacttttatttatcaaaatagctacaggaaacatgaatagcaggaaaacactgaatttgtttggatgttctaagaaatggtgctaagaaaatggtgtctttaatagctaaaaatttaatgcctttatatcatcaagatgctatcagtgtactccagtgcccttgaataataggggtaccttttcattcaagtttttatcataattacctattcttacacaagcttagtttttaaaatgtggacattttaaaggcctctggattttgctcatccagtgaagtccttgtaggacaataaacgtatatatgtacatatatacacaaacatgtatatgtgcacacacatgtatatgtataaatattttaaatggtgttttagaagcactttgtctacctaagctttgacaacttgaacaatgctaaggtactgagatgtttaaaaaacaagtttactttcattttagaatgcaaagttgatttttttaaggaaacaaagaaagcttttaaaatatttttgcttttagccatgcatctgctgatgagcaattgtgtccatttttaacacagccagttaaatccaccatggggcttactggattcaagggaatacgttagtccacaaaacatgttttctggtgctcatctcacatgctatactgtaaaacagttttatacaaaattgtatgacaagttcattgctcaaaaatgtacagttttaagaattttctattaactgcaggtaataattagctgcatgctgcagactcaacaaagctagttcactgaagcctatgctattttatggatcataggctcttcagagaactgaatggcagtctgcctttgtgttgataattatgtacattgtgacgttgtcatttcttagcttaagtgtcctctttaacaagaggattgagcagactgatgcctgcataagatgaataaacagggttagttccatgtgaatctgtcagttaaaaagaaacaaaaacaggcagctggtttgctgtggtggttttaaatcattaatttgtataaagaagtgaaagagttgtatagtaaattaaattgtaaacaaaacttttttaatgcaatgctttagtattttagtactgtaaaaaaattaaatatatacatatatatatatatatatatatatatatatatgagtttgaagcagaattcacatcatgatggtgctactcagcctgctacaaatatatcataatgtgagctaagaattcattaaatgtttgagtgatgttcctacttgtcatatacctcaacactagtttggcaataggatattgaactgagagtgaaagcattgtgtaccatcatttttttccaagtccttttttttattgttaaaaaaaaaagcataccttttttcaatacttgatttcttagcaagtataacttgaacttcaacctttttgttctaaaaattcagggatatttcagctcatgctctccctatgccaacatgtcacctgtgtttatgtaaaattgttgtaggttaataaatatattctttgtcagggatttaacccttttattttgaatcccttctattttacttgtacatgtgctgatgtaactaaaactaattttgtaaatctgttggctctttttattgtaaagaaaagcattttaaaagtttgaggaatcttttgactgtttcaagcaggaaaaaaaaattacatgaaaatagaatgcactgagttgataaagggaaaaattgtaaggcaggagtttggcaagtggctgttggccagagacttacttgtaactctctaaatgaagtttttttgatcctgtaatcactgaaggtacatactccatgtggacttcccttaaacaggcaaacacctacaggtatggtgtgcaacagattgtacaattacattttggcctaaatacatttttgcttactagtatttaaaataaattcttaatcagaggaggcctttgggttttattggtcaaatctttgtaagctggcttttgtctttttaaaaaatttcttgaatttgtggttgtgtccaatttgcaaacatttccaaaaatgtttgctttgcttacaaaccacatgattttaatgttttttgtataccataatatctagccccaaacatttgattactacatgtgcattggtgattttgatcatccattcttaatatttgatttctgtgtcacctactgtcatttgttaaactgctggccaacaagaacaggaagtatagtttggggggttggggagagtttacataaggaagagaagaaattgagtggcatattgtaaatatcagatctataattgtaaatataaaacctgcctcagttagaatgaatggaaagcagatctacaatttgctaatataggaatatcaggttgactatatagccatacttgaaaatgcttctgagtggtgtcaactttacttgaatgaatttttcatcttgattgacgcacagtgatgtacagttcacttctgaagctagtggttaacttgtgtaggaaacttttgcagtttgacactaagataacttctgtgtgcatttttctatgcttttttaaaaactagtttcatttcattttcatgagatgtttggtttataagatctgaggatggttataaatactgtaagtattgtaatgttatgaatgcaggttatttgaaagctgtttattattatatcattcctgataatgctatgtgagtgtttttaataaaatttatatttatttaatgcactctaa

SEQ ID NO: 956 - DNA, 4594 bp, Homo sapiens
  source 1..4594: mol_type = other DNA
gtagagaagcagaaggaagcaagatggctgccctttaggatttgttagaaaggagacccgactgcaactgctggattgctgcaaggctgagggacgagaacgaggctggcaaacattcagcagcacaccctctcaagattgtttacttgcctttgctcctgttgagttacaacgcttggaagcaggagatgggctcagcagcagccaataggacatgatccaggaagagcagtaagggactgagctgctgaattcaactagagggcagccttgtggatggccccgaagcaagcctgatggaacaggatagaaccaaccatgttgagggcaacagactaagtccattcctgataccatcacctcccatttgccagacagaacctctggctacaaagctccagaatggaagcccactgcctgagagagctcatccagaagtaaatggagacaccaagtggcactctttcaaaagttattatggaataccctgtatgaagggaagccagaatagtcgtgtgagtcctgactttacacaagaaagtagagggtattccaagtgtttgcaaaatggaggaataaaacgcacagttagtgaaccttctctctctgggctccttcagatcaagaaattgaaacaagaccaaaaggctaatggagaaagacgtaacttcggggtaagccaagaaagaaatccaggtgaaagcagtcaaccaaatgtctccgatttgagtgataagaaagaatctgtgagttctgtagcccaagaaaatgcagttaaagatttcaccagtttttcaacacataactgcagtgggcctgaaaatccagagcttcagattctgaatgagcaggaggggaaaagtgctaattaccatgacaagaacattgtattacttaaaaacaaggcagtgctaatgcctaatggtgctacagtttctgcctcttccgtggaacacacacatggtgaactcctggaaaaaacactgtctcaatattatccagattgtgtttccattgcggtgcagaaaaccacatctcacataaatgccattaacagtcaggctactaatgagttgtcctgtgagatcactcacccatcgcatacctcagggcagatcaattccgcacagacctctaactctgagctgcctccaaagccagctgcagtggtgagtgaggcctgtgatgctgatgatgctgataatgccagtaaactagctgcaatgctaaatacctgttcctttcagaaaccagaacaactacaacaacaaaaatcagtttttgagatatgcccatctcctgcagaaaataacatccagggaaccacaaagctagcgtctggtgaagaattctgttcaggttccagcagcaatttgcaagctcctggtggcagctctgaacggtatttaaaacaaaatgaaatgaatggtgcttacttcaagcaaagctcagtgttcactaaggattccttttctgccactaccacaccaccaccaccatcacaattgcttctttctccccctcctcctcttccacaggttcctcagcttccttcagaaggaaaaagcactctgaatggtggagttttagaagaacaccaccactaccccaaccaaagtaacacaacacttttaagggaagtgaaaatagagggtaaacctgaggcaccaccttcccagagtcctaatccatctacacatgtatgcagcccttctccgatgctttctgaaaggcctcagaataattgtgtgaacaggaatgacatacagactgcagggacaatgactgttccattgtgttctgagaaaacaagaccaatgtcagaacacctcaagcataacccaccaatttttggtagcagtggagagctacaggacaactgccagcagttgatgagaaacaaagagcaagagattctgaagggtcgagacaaggagcaaacacgagatcttgtgcccccaacacagcactatctgaaaccaggatggattgaattgaaggcccctcgttttcaccaagcggaatcccatctaaaacgtaatgaggcatcactgccatcaattcttcagtatcaacccaatctctccaatcaaatgacctccaaacaatacactggaaattccaacatgcctggggggctcccaaggcaagcttacacccagaaaacaacacagctggagcacaagtcacaaatgtaccaagttgaaatgaatcaagggcagtcccaaggtacagtggaccaacatctccagttccaaaaaccctcacaccaggtgcacttctccaaaacagaccatttaccaaaagctcatgtgcagtcactgtgtggcactagatttcattttcaacaaagagcagattcccaaactgaaaaacttatgtccccagtgttgaaacagcacttgaatcaacaggcttcagagactgagccattttcaaactcacaccttttgcaacataagcctcataaacaggcagcacaaacacaaccatcccagagttcacatctccctcaaaaccagcaacagcagcaaaaattacaaataaagaataaagaggaaatactccagacttttcctcacccccaaagcaacaatgatcagcaaagagaaggatcattctttggccagactaaagtggaagaatgttttcatggtgaaaatcagtattcaaaatcaagcgagttcgagactcataatgtccaaatgggactggaggaagtacagaatataaatcgtagaaattccccttatagtcagaccatgaaatcaagtgcatgcaaaatacaggtttcttgttcaaacaatacacacctagtttcagagaataaagaacagactacacatcctgaactttttgcaggaaacaagacccaaaacttgcatcacatgcaatattttccaaataatgtgatcccaaagcaagatcttcttcacaggtgctttcaagaacaggagcagaagtcacaacaagcttcagttctacagggatataaaaatagaaaccaagatatgtctggtcaacaagctgcgcaacttgctcagcaaaggtacttgatacataaccatgcaaatgtttttcctgtgcctgaccagggaggaagtcacactcagacccctccccagaaggacactcaaaagcatgctgctctaaggtggcatctcttacagaagcaagaacagcagcaaacacagcaaccccaaactgagtcttgccatagtcagatgcacaggccaattaaggtggaacctggatgcaagccacatgcctgtatgcacacagcaccaccagaaaacaaaacatggaaaaaggtaactaagcaagagaatccacctgcaagctgtgataatgtgcagcaaaagagcatcattgagaccatggagcagcatctgaagcagtttcacgccaagtcgttatttgaccataaggctcttactctcaaatcacagaagcaagtaaaagttgaaatgtcagggccagtcacagttttgactagacaaaccactgctgcagaacttgatagccacaccccagctttagagcagcaaacaacttcttcagaaaagacaccaaccaaaagaacagctgcttctgttctcaataattttatagagtcaccttccaaattactagatactcctataaaaaatttattggatacacctgtcaagactcaatatgatttcccatcttgcagatgtgtagagcaaattattgaaaaagatgaaggtcctttttatacccatctaggagcaggtcctaatgtggcagctattagagaaatcatggaagaaaggtatacaagtacttgcctttactcctgcatgtagaagactcttatgagcgagataatgcagagaaggcctttcatataaatttatacagctctgagctgttcttcttctagggtgccttttcattaagaggtaggcagtattattattaaagtacttaggatacattggggcagctaggacatattcagtatcattcttgctccatttccaaattattcatttctaaattagcatgtagaagttcactaaataatcatctagtggcctggcagaaatagtgaatttccctaagtgccttttttttgttgtttttttgttttgttttttaaacaagcagtaggtggtgctttggtcataagggaagatatagtctatttctaggactattccatattttccatgtggctggatactaactatttgccagcctccttttctaaattgtgagacattcttggaggaacagttctaactaaaatctattatgactccccaagttttaaaatagctaaatttagtaagggaaaaaatagtttatgttttagaagactgaacttagcaaactaacctgaattttgtgctttgtgaaattttatatcgaaatgagctttcccattttcacccacatgtaatttacaaaatagttcattacaattatctgtacattttgatattgaggaaaaacaaggcttaaaaaccattatccagtttgcttggcgtagacctgtttaaaaaataataaaccgttcatttctcaggatgtggtcatagaataaagttatgctcaaatgttcaaa

SEQ ID NO: 957-999 - skipped (43 entries)

SEQ ID NO: 1000 - RNA, 20 nt, synthetic construct
  misc_feature 1..20: note = source = /note="Description of Artificial Sequence: Synthetic oligonucleotide"
  source 1..20: mol_type = other RNA
ttctccccttcgctttttct

SEQ ID NO: 1001 - RNA, 20 nt, synthetic construct
  misc_feature 1..20: note = source = /note="Description of Artificial Sequence: Synthetic oligonucleotide"
  source 1..20: mol_type = other RNA
tctccccttcgctttttctc

SEQ ID NO: 1002 - RNA, 20 nt, synthetic construct
  misc_feature 1..20: note = source = /note="Description of Artificial Sequence: Synthetic oligonucleotide"
  source 1..20: mol_type = other RNA
tcgctttttctcgggcttcc

SEQ ID NO: 1003 - RNA, 20 nt, synthetic construct
  misc_feature 1..20: note = source = /note="Description of Artificial Sequence: Synthetic oligonucleotide"
  source 1..20: mol_type = other RNA
cgctttttctcgggcttcca

SEQ ID NO: 1004 - RNA, 20 nt, synthetic construct
  misc_feature 1..20: note = source = /note="Description of Artificial Sequence: Synthetic oligonucleotide"
  source 1..20: mol_type = other RNA
tttctcgggcttccagggac

SEQ ID NO: 1005 - RNA, 20 nt, synthetic construct
  misc_feature 1..20: note = source = /note="Description of Artificial Sequence: Synthetic oligonucleotide"
  source 1..20: mol_type = other RNA
ttctcgggcttccagggact

SEQ ID NO: 1006 - RNA, 20 nt, synthetic construct
  misc_feature 1..20: note = source = /note="Description of Artificial Sequence: Synthetic oligonucleotide"
  source 1..20: mol_type = other RNA
tctcgggcttccagggactg

SEQ ID NO: 1007 - RNA, 20 nt, synthetic construct
  misc_feature 1..20: note = source = /note="Description of Artificial Sequence: Synthetic oligonucleotide"
  source 1..20: mol_type = other RNA
tgtcacccacaaataccaag

SEQ ID NO: 1008 - RNA, 20 nt, synthetic construct
  misc_feature 1..20: note = source = /note="Description of Artificial Sequence: Synthetic oligonucleotide"
  source 1..20: mol_type = other RNA
gtcacccacaaataccaaga

SEQ ID NO: 1009 - RNA, 20 nt, synthetic construct
  misc_feature 1..20: note = source = /note="Description of Artificial Sequence: Synthetic oligonucleotide"
  source 1..20: mol_type = other RNA
cacaaataccaagagggaag

SEQ ID NO: 1010 - RNA, 20 nt, synthetic construct
  misc_feature 1..20: note = source = /note="Description of Artificial Sequence: Synthetic oligonucleotide"
  source 1..20: mol_type = other RNA
acaaataccaagagggaaga

SEQ ID NO: 1011 - RNA, 20 nt, synthetic construct
  misc_feature 1..20: note = source = /note="Description of Artificial Sequence: Synthetic oligonucleotide"
  source 1..20: mol_type = other RNA
agggaagcttcacaaattac

SEQ ID NO: 1012 - RNA, 20 nt, synthetic construct
  misc_feature 1..20: note = source = /note="Description of Artificial Sequence: Synthetic oligonucleotide"
  source 1..20: mol_type = other RNA
ttactggagcctcttcaaca

SEQ ID NO: 1013 - RNA, 20 nt, synthetic construct
  misc_feature 1..20: note = source = /note="Description of Artificial Sequence: Synthetic oligonucleotide"
  source 1..20: mol_type = other RNA
cctttgtgcctccgacgagc

SEQ ID NO: 1014 - RNA, 20 nt, synthetic construct
  misc_feature 1..20: note = source = /note="Description of Artificial Sequence: Synthetic oligonucleotide"
  source 1..20: mol_type = other RNA
cctccgacgagccggtttcc

SEQ ID NO: 1015 - RNA, 20 nt, synthetic construct
  misc_feature 1..20: note = source = /note="Description of Artificial Sequence: Synthetic oligonucleotide"
  source 1..20: mol_type = other RNA
tttctaaaatagttcagctt

SEQ ID NO: 1016 - RNA, 20 nt, synthetic construct
  misc_feature 1..20: note = source = /note="Description of Artificial Sequence: Synthetic oligonucleotide"
  source 1..20: mol_type = other RNA
ttctaaaatagttcagcttt

SEQ ID NO: 1017 - RNA, 20 nt, synthetic construct
  misc_feature 1..20: note = source = /note="Description of Artificial Sequence: Synthetic oligonucleotide"
  source 1..20: mol_type = other RNA
tctaaaatagttcagctttg

SEQ ID NO: 1018 - RNA, 20 nt, synthetic construct
  misc_feature 1..20: note = source = /note="Description of Artificial Sequence: Synthetic oligonucleotide"
  source 1..20: mol_type = other RNA
ctaaaatagttcagctttgg

SEQ ID NO: 1019 - RNA, 20 nt, synthetic construct
  misc_feature 1..20: note = source = /note="Description of Artificial Sequence: Synthetic oligonucleotide"
  source 1..20: mol_type = other RNA
acctcagagagaacactgat

SEQ ID NO: 1020 - RNA, 20 nt, synthetic construct
  misc_feature 1..20: note = source = /note="Description of Artificial Sequence: Synthetic oligonucleotide"
  source 1..20: mol_type = other RNA
cctcagagagaacactgata

SEQ ID NO: 1021 - RNA, 20 nt, synthetic construct
  misc_feature 1..20: note = source = /note="Description of Artificial Sequence: Synthetic oligonucleotide"
  source 1..20: mol_type = other RNA
tcgacccttttatcagctgt

SEQ ID NO: 1022 - RNA, 20 nt, synthetic construct
  misc_feature 1..20: note = source = /note="Description of Artificial Sequence: Synthetic oligonucleotide"
  source 1..20: mol_type = other RNA
cgacccttttatcagctgta

SEQ ID NO: 1023 - RNA, 20 nt, synthetic construct
  misc_feature 1..20: note = source = /note="Description of Artificial Sequence: Synthetic oligonucleotide"
  source 1..20: mol_type = other RNA
cttttatcagctgtagggtc

SEQ ID NO: 1024 - RNA, 20 nt, synthetic construct
  misc_feature 1..20: note = source = /note="Description of Artificial Sequence: Synthetic oligonucleotide"
  source 1..20: mol_type = other RNA
ttttatcagctgtagggtct

SEQ ID NO: 1025 - RNA, 20 nt, synthetic construct
  misc_feature 1..20: note = source = /note="Description of Artificial Sequence: Synthetic oligonucleotide"
  source 1..20: mol_type = other RNA
tcagctgtagggtctgggtc

SEQ ID NO: 1026 - RNA, 20 nt, synthetic construct
  misc_feature 1..20: note = source = /note="Description of Artificial Sequence: Synthetic oligonucleotide"
  source 1..20: mol_type = other RNA
cagctgtagggtctgggtct

SEQ ID NO: 1027 - RNA, 20 nt, synthetic construct
  misc_feature 1..20: note = source = /note="Description of Artificial Sequence: Synthetic oligonucleotide"
  source 1..20: mol_type = other RNA
ctaccttcttatcccccttt

SEQ ID NO: 1028 - RNA, 20 nt, synthetic construct
  misc_feature 1..20: note = source = /note="Description of Artificial Sequence: Synthetic oligonucleotide"
  source 1..20: mol_type = other RNA
taccttcttatcccccttta

SEQ ID NO: 1029 - RNA, 20 nt, synthetic construct
  misc_feature 1..20: note = source = /note="Description of Artificial Sequence: Synthetic oligonucleotide"
  source 1..20: mol_type = other RNA
accttcttatccccctttag

SEQ ID NO: 1030 - RNA, 20 nt, synthetic construct
  misc_feature 1..20: note = source = /note="Description of Artificial Sequence: Synthetic oligonucleotide"
  source 1..20: mol_type = other RNA
ccttcttatccccctttagg

SEQ ID NO: 1031 - RNA, 20 nt, synthetic construct
  misc_feature 1..20: note = source = /note="Description of Artificial Sequence: Synthetic oligonucleotide"
  source 1..20: mol_type = other RNA
ctgtacgaagtgaatgtcac

SEQ ID NO: 1032 - RNA, 20 nt, synthetic construct
  misc_feature 1..20: note = source = /note="Description of Artificial Sequence: Synthetic oligonucleotide"
  source 1..20: mol_type = other RNA
tgtacgaagtgaatgtcaca

SEQ ID NO: 1033 - RNA, 20 nt, synthetic construct
  misc_feature 1..20: note = source = /note="Description of Artificial Sequence: Synthetic oligonucleotide"
  source 1..20: mol_type = other RNA
gaagtgaatgtcacagggag

SEQ ID NO: 1034 - RNA, 20 nt, synthetic construct
  misc_feature 1..20: note = source = /note="Description of Artificial Sequence: Synthetic oligonucleotide"
  source 1..20: mol_type = other RNA
aatgtcacagggagtggaat

SEQ ID NO: 1035 - RNA, 20 nt, synthetic construct
  misc_feature 1..20: note = source = /note="Description of Artificial Sequence: Synthetic oligonucleotide"
  source 1..20: mol_type = other RNA
tggaattggagtacactgag

SEQ ID NO: 1036 - RNA, 20 nt, synthetic construct
  misc_feature 1..20: note = source = /note="Description of Artificial Sequence: Synthetic oligonucleotide"
  source 1..20: mol_type = other RNA
ggaattggagtacactgagt

SEQ ID NO: 1037 - RNA, 20 nt, synthetic construct
  misc_feature 1..20: note = source = /note="Description of Artificial Sequence: Synthetic oligonucleotide"
  source 1..20: mol_type = other RNA
aagtccgcgcgttttgttag

SEQ ID NO: 1038 - RNA, 20 nt, synthetic construct
  misc_feature 1..20: note = source = /note="Description of Artificial Sequence: Synthetic oligonucleotide"
  source 1..20: mol_type = other RNA
ttagcggcgctgagtgaaag

SEQ ID NO: 1039 - RNA, 20 nt, synthetic construct
  misc_feature 1..20: note = source = /note="Description of Artificial Sequence: Synthetic oligonucleotide"
  source 1..20: mol_type = other RNA
agaggaaagaatagtttctc

SEQ ID NO: 1040 - RNA, 20 nt, synthetic construct
  misc_feature 1..20: note = source = /note="Description of Artificial Sequence: Synthetic oligonucleotide"
  source 1..20: mol_type = other RNA
accagaactcacttttctca

SEQ ID NO: 1041 - RNA, 20 nt, synthetic construct
  misc_feature 1..20: note = source = /note="Description of Artificial Sequence: Synthetic oligonucleotide"
  source 1..20: mol_type = other RNA
caaggtacataagtcagcgc

SEQ ID NO: 1042 - RNA, 20 nt, synthetic construct
  misc_feature 1..20: note = source = /note="Description of Artificial Sequence: Synthetic oligonucleotide"
  source 1..20: mol_type = other RNA
aaggtacataagtcagcgct

SEQ ID NO: 1043 - RNA, 20 nt, synthetic construct
  misc_feature 1..20: note = source = /note="Description of Artificial Sequence: Synthetic oligonucleotide"
  source 1..20: mol_type = other RNA
ctgggctgagccttccagcc

SEQ ID NO: 1044 - RNA, 20 nt, synthetic construct
  misc_feature 1..20: note = source = /note="Description of Artificial Sequence: Synthetic oligonucleotide"
  source 1..20: mol_type = other RNA
tgggctgagccttccagcct

SEQ ID NO: 1045 - RNA, 20 nt, synthetic construct
  misc_feature 1..20: note = source = /note="Description of Artificial Sequence: Synthetic oligonucleotide"
  source 1..20: mol_type = other RNA
gggctgagccttccagcctg

SEQ ID NO: 1046 - RNA, 20 nt, synthetic construct
  misc_feature 1..20: note = source = /note="Description of Artificial Sequence: Synthetic oligonucleotide"
  source 1..20: mol_type = other RNA
aatgtatgtaagagaattta

SEQ ID NO: 1047 - RNA, 20 nt, synthetic construct
  misc_feature 1..20: note = source = /note="Description of Artificial Sequence: Synthetic oligonucleotide"
  source 1..20: mol_type = other RNA
ttatggacaaatctgtgtcc

SEQ ID NO: 1048 - RNA, 20 nt, synthetic construct
  misc_feature 1..20: note = source = /note="Description of Artificial Sequence: Synthetic oligonucleotide"
  source 1..20: mol_type = other RNA
tctcccgaatcagcttcgtt

SEQ ID NO: 1049 - RNA, 20 nt, synthetic construct
  misc_feature 1..20: note = source = /note="Description of Artificial Sequence: Synthetic oligonucleotide"
  source 1..20: mol_type = other RNA
atcagcttcgtttggttcct

SEQ ID NO: 1050 - RNA, 20 nt, synthetic construct
  misc_feature 1..20: note = source = /note="Description of Artificial Sequence: Synthetic oligonucleotide"
  source 1..20: mol_type = other RNA
ttggttccttggtaagtgac

SEQ ID NO: 1051 - RNA, 20 nt, synthetic construct
  misc_feature 1..20: note = source = /note="Description of Artificial Sequence: Synthetic oligonucleotide"
  source 1..20: mol_type = other RNA
taagtgacaggcagacacaa

SEQ ID NO: 1052 - RNA, 20 nt, synthetic construct
  misc_feature 1..20: note = source = /note="Description of Artificial Sequence: Synthetic oligonucleotide"
  source 1..20: mol_type = other RNA
tgacaggcagacacaaaggc

SEQ ID NO: 1053 - RNA, 20 nt, synthetic construct
  misc_feature 1..20: note = source = /note="Description of Artificial Sequence: Synthetic oligonucleotide"
  source 1..20: mol_type = other RNA
gcagacacaaaggcaggcgc

SEQ ID NO: 1054 - RNA, 20 nt, synthetic construct
  misc_feature 1..20: note = source = /note="Description of Artificial Sequence: Synthetic oligonucleotide"
  source 1..20: mol_type = other RNA
cacaaaggcaggcgcaggcc

SEQ ID NO: 1055 - RNA, 20 nt, synthetic construct
  misc_feature 1..20: note = source = /note="Description of Artificial Sequence: Synthetic oligonucleotide"
  source 1..20: mol_type = other RNA
acaaaggcaggcgcaggccc

SEQ ID NO: 1056 - RNA, 20 nt, synthetic construct
  misc_feature 1..20: note = source = /note="Description of Artificial Sequence: Synthetic oligonucleotide"
  source 1..20: mol_type = other RNA
caaaggcaggcgcaggcccg

SEQ ID NO: 1057 - RNA, 20 nt, synthetic construct
  misc_feature 1..20: note = source = /note="Description of Artificial Sequence: Synthetic oligonucleotide"
  source 1..20: mol_type = other RNA
aggcaggcgcaggcccgggg

SEQ ID NO: 1058 - RNA, 20 nt, synthetic construct
  misc_feature 1..20: note = source = /note="Description of Artificial Sequence: Synthetic oligonucleotide"
  source 1..20: mol_type = other RNA
ggcaggcgcaggcccgggga

SEQ ID NO: 1059 - RNA, 20 nt, synthetic construct
  misc_feature 1..20: note = source = /note="Description of Artificial Sequence: Synthetic oligonucleotide"
  source 1..20: mol_type = other RNA
gcaggcgcaggcccggggag

SEQ ID NO: 1060 - RNA, 20 nt, synthetic construct
  misc_feature 1..20: note = source = /note="Description of Artificial Sequence: Synthetic oligonucleotide"
  source 1..20: mol_type = other RNA
caggcgcaggcccggggagg

SEQ ID NO: 1061 - RNA, 20 nt, synthetic construct
  misc_feature 1..20: note = source = /note="Description of Artificial Sequence: Synthetic oligonucleotide"
  source 1..20: mol_type = other RNA
gcgcaggcccggggaggggg

SEQ ID NO: 1062 - RNA, 20 nt, synthetic construct
  misc_feature 1..20: note = source = /note="Description of Artificial Sequence: Synthetic oligonucleotide"
  source 1..20: mol_type = other RNA
cgcaggcccggggagggggc

SEQ ID NO: 1063 - RNA, 20 nt, synthetic construct
  misc_feature 1..20: note = source = /note="Description of Artificial Sequence: Synthetic oligonucleotide"
  source 1..20: mol_type = other RNA
aggcccggggagggggcggg

SEQ ID NO: 1064 - RNA, 20 nt, synthetic construct
  misc_feature 1..20: note = source = /note="Description of Artificial Sequence: Synthetic oligonucleotide"
  source 1..20: mol_type = other RNA
ggcccggggagggggcggga

SEQ ID NO: 1065 - RNA, 20 nt, synthetic construct
  misc_feature 1..20: note = source = /note="Description of Artificial Sequence: Synthetic oligonucleotide"
  source 1..20: mol_type = other RNA
gcccggggagggggcgggag

SEQ ID NO: 1066 - RNA, 20 nt, synthetic construct
  misc_feature 1..20: note = source = /note="Description of Artificial Sequence: Synthetic oligonucleotide"
  source 1..20: mol_type = other RNA
cccggggagggggcgggagg

SEQ ID NO: 1067 - RNA, 20 nt, synthetic construct
  misc_feature 1..20: note = source = /note="Description of Artificial Sequence: Synthetic oligonucleotide"
  source 1..20: mol_type = other RNA
ggggagggggcgggaggggg

SEQ ID NO: 1068 - RNA, 20 nt, synthetic construct
  misc_feature 1..20: note = source = /note="Description of Artificial Sequence: Synthetic oligonucleotide"
  source 1..20: mol_type = other RNA
gggagggggcgggagggggt

SEQ ID NO: 1069 - RNA, 20 nt, synthetic construct
  misc_feature 1..20: note = source = /note="Description of Artificial Sequence: Synthetic oligonucleotide"
  source 1..20: mol_type = other RNA
ggagggggcgggagggggtg

SEQ ID NO: 1070 - RNA, 20 nt, synthetic construct
  misc_feature 1..20: note = source = /note="Description of Artificial Sequence: Synthetic oligonucleotide"
  source 1..20: mol_type = other RNA
gggggtggggagcgcagcgt

SEQ ID NO: 1071 - RNA, 20 nt, synthetic construct
  misc_feature 1..20: note = source = /note="Description of Artificial Sequence: Synthetic oligonucleotide"
  source 1..20: mol_type = other RNA
gttggagttgcaagactgca

SEQ ID NO: 1072 - RNA, 20 nt, synthetic construct
  misc_feature 1..20: note = source = /note="Description of Artificial Sequence: Synthetic oligonucleotide"
  source 1..20: mol_type = other RNA
agttgcaagactgcaaggtc

SEQ ID NO: 1073 - RNA, 20 nt, synthetic construct
  misc_feature 1..20: note = source = /note="Description of Artificial Sequence: Synthetic oligonucleotide"
  source 1..20: mol_type = other RNA
gttgcaagactgcaaggtca

SEQ ID NO: 1074 - RNA, 20 nt, synthetic construct
  misc_feature 1..20: note = source = /note="Description of Artificial Sequence: Synthetic oligonucleotide"
  source 1..20: mol_type = other RNA
ttgcaagactgcaaggtcag

SEQ ID NO: 1075 - RNA, 20 nt, synthetic construct
  misc_feature 1..20: note = source = /note="Description of Artificial Sequence: Synthetic oligonucleotide"
  source 1..20: mol_type = other RNA
gtcccatccaaatttctctt

SEQ ID NO: 1076 - RNA, 20 nt, synthetic construct
  misc_feature 1..20: note = source = /note="Description of Artificial Sequence: Synthetic oligonucleotide"
  source 1..20: mol_type = other RNA
ttctctttggcttctctctt

SEQ ID NO: 1077 - RNA, 20 nt, synthetic construct
  misc_feature 1..20: note = source = /note="Description of Artificial Sequence: Synthetic oligonucleotide"
  source 1..20: mol_type = other RNA
atcttgctgaatcttttcac

SEQ ID NO: 1078 - RNA, 20 nt, synthetic construct
  misc_feature 1..20: note = source = /note="Description of Artificial Sequence: Synthetic oligonucleotide"
  source 1..20: mol_type = other RNA
tcttgctgaatcttttcact

SEQ ID NO: 1079 - RNA, 20 nt, synthetic construct
  misc_feature 1..20: note = source = /note="Description of Artificial Sequence: Synthetic oligonucleotide"
  source 1..20: mol_type = other RNA
tctagttttattaagctaat

SEQ ID NO: 1080 - RNA, 20 nt, synthetic construct
  misc_feature 1..20: note = source = /note="Description of Artificial Sequence: Synthetic oligonucleotide"
  source 1..20: mol_type = other RNA
ctagttttattaagctaata

SEQ ID NO: 1081 - RNA, 20 nt, synthetic construct
  misc_feature 1..20: note = source = /note="Description of Artificial Sequence: Synthetic oligonucleotide"
  source 1..20: mol_type = other RNA
ttaagctaatagggtttgta

SEQ ID NO: 1082 - RNA, 20 nt, synthetic construct
  misc_feature 1..20: note = source = /note="Description of Artificial Sequence: Synthetic oligonucleotide"
  source 1..20: mol_type = other RNA
acctatgacataatgaagtg

SEQ ID NO: 1083 - RNA, 20 nt, synthetic construct
  misc_feature 1..20: note = source = /note="Description of Artificial Sequence: Synthetic oligonucleotide"
  source 1..20: mol_type = other RNA
tgacataatgaagtgtggcc

SEQ ID NO: 1084 - RNA, 20 nt, synthetic construct
  misc_feature 1..20: note = source = /note="Description of Artificial Sequence: Synthetic oligonucleotide"
  source 1..20: mol_type = other RNA
gtgtggcctggatagactcc

SEQ ID NO: 1085 - RNA, 20 nt, synthetic construct
  misc_feature 1..20: note = source = /note="Description of Artificial Sequence: Synthetic oligonucleotide"
  source 1..20: mol_type = other RNA
gcctggatagactcctggaa

SEQ ID NO: 1086 - RNA, 20 nt, synthetic construct
  misc_feature 1..20: note = source = /note="Description of Artificial Sequence: Synthetic oligonucleotide"
  source 1..20: mol_type = other RNA
gaaatataagtgttatttgc

SEQ ID NO: 1087 - RNA, 20 nt, synthetic construct
  misc_feature 1..20: note = source = /note="Description of Artificial Sequence: Synthetic oligonucleotide"
  source 1..20: mol_type = other RNA
atatacttttaattacattg

SEQ ID NO: 1088 - RNA, 20 nt, synthetic construct
  misc_feature 1..20: note = source = /note="Description of Artificial Sequence: Synthetic oligonucleotide"
  source 1..20: mol_type = other RNA
tatacttttaattacattga

SEQ ID NO: 1089 - RNA, 20 nt, synthetic construct
  misc_feature 1..20: note = source = /note="Description of Artificial Sequence: Synthetic oligonucleotide"
  source 1..20: mol_type = other RNA
aatgtttaagaattgagaaa

SEQ ID NO: 1090 - RNA, 20 nt, synthetic construct
  misc_feature 1..20: note = source = /note="Description of Artificial Sequence: Synthetic oligonucleotide"
  source 1..20: mol_type = other RNA
agaaaaggcttattttccag

SEQ ID NO: 1091 - RNA, 20 nt, synthetic construct
  misc_feature 1..20: note = source = /note="Description of Artificial Sequence: Synthetic oligonucleotide"
  source 1..20: mol_type = other RNA
atttatatatttacgtgtct

SEQ ID NO: 1092 - RNA, 20 nt, synthetic construct
  misc_feature 1..20: note = source = /note="Description of Artificial Sequence: Synthetic oligonucleotide"
  source 1..20: mol_type = other RNA
tttatatatttacgtgtcta

SEQ ID NO: 1093 - RNA, 20 nt, synthetic construct
  misc_feature 1..20: note = source = /note="Description of Artificial Sequence: Synthetic oligonucleotide"
  source 1..20: mol_type = other RNA
atatttacgtgtctagggag

SEQ ID NO: 1094 - RNA, 20 nt, synthetic construct
  misc_feature 1..20: note = source = /note="Description of Artificial Sequence: Synthetic oligonucleotide"
  source 1..20: mol_type = other RNA
gtgctttttccccttcagtc

SEQ ID NO: 1095 - RNA, 20 nt, synthetic construct
  misc_feature 1..20: note = source = /note="Description of Artificial Sequence: Synthetic oligonucleotide"
  source 1..20: mol_type = other RNA
tgctttttccccttcagtca

SEQ ID NO: 1096 - RNA, 20 nt, synthetic construct
  misc_feature 1..20: note = source = /note="Description of Artificial Sequence: Synthetic oligonucleotide"
  source 1..20: mol_type = other RNA
ccttcagtcagggattataa

SEQ ID NO: 1097 - RNA, 20 nt, synthetic construct
  misc_feature 1..20: note = source = /note="Description of Artificial Sequence: Synthetic oligonucleotide"
  source 1..20: mol_type = other RNA
cttcagtcagggattataat

SEQ ID NO: 1098 - RNA, 20 nt, synthetic construct
  misc_feature 1..20: note = source = /note="Description of Artificial Sequence: Synthetic oligonucleotide"
  source 1..20: mol_type = other RNA
atcaacaaatgatccatcat

SEQ ID NO: 1099 - RNA, 20 nt, synthetic construct
  misc_feature 1..20: note = source = /note="Description of Artificial Sequence: Synthetic oligonucleotide"
  source 1..20: mol_type = other RNA
aggaataagattgtatctta

SEQ ID NO: 1100 - RNA, 20 nt, synthetic construct
  misc_feature 1..20: note = source = /note="Description of Artificial Sequence: Synthetic oligonucleotide"
  source 1..20: mol_type = other RNA
ggaataagattgtatcttaa

SEQ ID NO: 1101 - RNA, 20 nt, synthetic construct
  misc_feature 1..20: note = source = /note="Description of Artificial Sequence: Synthetic oligonucleotide"
  source 1..20: mol_type = other RNA
gattgtatcttaagggaagt

SEQ ID NO: 1102 - RNA, 20 nt, synthetic construct
  misc_feature 1..20: note = source = /note="Description of Artificial Sequence: Synthetic oligonucleotide"
  source 1..20: mol_type = other RNA
attgtatcttaagggaagtt

SEQ ID NO: 1103 - RNA, 20 nt, synthetic construct
  misc_feature 1..20: note = source = /note="Description of Artificial Sequence: Synthetic oligonucleotide"
  source 1..20: mol_type = other RNA
gattcacagagaaaagacat

SEQ ID NO: 1104 - RNA, 20 nt, synthetic construct
  misc_feature 1..20: note = source = /note="Description of Artificial Sequence: Synthetic oligonucleotide"
  source 1..20: mol_type = other RNA
acagagaaaagacattggtt

SEQ ID NO: 1105 - RNA, 20 nt, synthetic construct
  misc_feature 1..20: note = source = /note="Description of Artificial Sequence: Synthetic oligonucleotide"
  source 1..20: mol_type = other RNA
gaaaagacattggtttggtt

SEQ ID NO: 1106 - RNA, 20 nt, synthetic construct
  misc_feature 1..20: note = source = /note="Description of Artificial Sequence: Synthetic oligonucleotide"
  source 1..20: mol_type = other RNA
tttggtttggtgtgatactg

SEQ ID NO: 1107 - RNA, 20 nt, synthetic construct
  misc_feature 1..20: note = source = /note="Description of Artificial Sequence: Synthetic oligonucleotide"
  source 1..20: mol_type = other RNA
ttggtttggtgtgatactgt

SEQ ID NO: 1108 - RNA, 20 nt, synthetic construct
  misc_feature 1..20: note = source = /note="Description of Artificial Sequence: Synthetic oligonucleotide"
  source 1..20: mol_type = other RNA
atactgtgggtattgttgcc

SEQ ID NO: 1109 - RNA, 20 nt, synthetic construct
  misc_feature 1..20: note = source = /note="Description of Artificial Sequence: Synthetic oligonucleotide"
  source 1..20: mol_type = other RNA
tcattacatttgcattttaa

SEQ ID NO: 1110 - RNA, 20 nt, synthetic construct
  misc_feature 1..20: note = source = /note="Description of Artificial Sequence: Synthetic oligonucleotide"
  source 1..20: mol_type = other RNA
aatggaaagttgaaatacta

SEQ ID NO: 1111 - RNA, 20 nt, synthetic construct
  misc_feature 1..20: note = source = /note="Description of Artificial Sequence: Synthetic oligonucleotide"
  source 1..20: mol_type = other RNA
atggaaagttgaaatactaa

SEQ ID NO: 1112 - RNA, 20 nt, synthetic construct
  misc_feature 1..20: note = source = /note="Description of Artificial Sequence: Synthetic oligonucleotide"
  source 1..20: mol_type = other RNA
tggaaagttgaaatactaag

SEQ ID NO: 1113 - RNA, 20 nt, synthetic construct
  misc_feature 1..20: note = source = /note="Description of Artificial Sequence: Synthetic oligonucleotide"
  source 1..20: mol_type = other RNA
tatgtgtgcttaataatgtt

SEQ ID NO: 1114 - RNA, 20 nt, synthetic construct
  misc_feature 1..20: note = source = /note="Description of Artificial Sequence: Synthetic oligonucleotide"
  source 1..20: mol_type = other RNA
aaatgttaataagcagagaa

SEQ ID NO: 1115 - RNA, 20 nt, synthetic construct
  misc_feature 1..20: note = source = /note="Description of Artificial Sequence: Synthetic oligonucleotide"
  source 1..20: mol_type = other RNA
gagaacggttaatgaagtgt

SEQ ID NO: 1116 - RNA, 20 nt, synthetic construct
  misc_feature 1..20: note = source = /note="Description of Artificial Sequence: Synthetic oligonucleotide"
  source 1..20: mol_type = other RNA
aagtttagaagacaatttat

SEQ ID NO: 1117 - RNA, 20 nt, synthetic construct
  misc_feature 1..20: note = source = /note="Description of Artificial Sequence: Synthetic oligonucleotide"
  source 1..20: mol_type = other RNA
caatttataggattaaaaaa

SEQ ID NO: 1118 - RNA, 20 nt, synthetic construct
  misc_feature 1..20: note = source = /note="Description of Artificial Sequence: Synthetic oligonucleotide"
  source 1..20: mol_type = other RNA
aggattaaaaaatggataga

SEQ ID NO: 1119 - RNA, 20 nt, synthetic construct
  misc_feature 1..20: note = source = /note="Description of Artificial Sequence: Synthetic oligonucleotide"
  source 1..20: mol_type = other RNA
ttgctttaatcattgatacg

SEQ ID NO: 1120 - RNA, 20 nt, synthetic construct
  misc_feature 1..20: note = source = /note="Description of Artificial Sequence: Synthetic oligonucleotide"
  source 1..20: mol_type = other RNA
tgctttaatcattgatacgt

SEQ ID NO: 1121 - RNA, 20 nt, synthetic construct
  misc_feature 1..20: note = source = /note="Description of Artificial Sequence: Synthetic oligonucleotide"
  source 1..20: mol_type = other RNA
gctttaatcattgatacgtg

SEQ ID NO: 1122 - RNA, 20 nt, synthetic construct
  misc_feature 1..20: note = source = /note="Description of Artificial Sequence: Synthetic oligonucleotide"
  source 1..20: mol_type = other RNA
ggttctttcacatgattaca

SEQ ID NO: 1123 - RNA, 20 nt, synthetic construct
  misc_feature 1..20: note = source = /note="Description of Artificial Sequence: Synthetic oligonucleotide"
  source 1..20: mol_type = other RNA
gttctttcacatgattacaa

SEQ ID NO: 1124 - RNA, 20 nt, synthetic construct
  misc_feature 1..20: note = source = /note="Description of Artificial Sequence: Synthetic oligonucleotide"
  source 1..20: mol_type = other RNA
agaagcattactcatctctg

SEQ ID NO: 1125 - RNA, 20 nt, synthetic construct
  misc_feature 1..20: note = source = /note="Description of Artificial Sequence: Synthetic oligonucleotide"
  source 1..20: mol_type = other RNA
tcatctctgtggaatagaaa

SEQ ID NO: 1126 - RNA, 20 nt, synthetic construct
  misc_feature 1..20: note = source = /note="Description of Artificial Sequence: Synthetic oligonucleotide"
  source 1..20: mol_type = other RNA
gtggaatagaaacggttcat

SEQ ID NO: 1127 - RNA, 20 nt, synthetic construct
  misc_feature 1..20: note = source = /note="Description of Artificial Sequence: Synthetic oligonucleotide"
  source 1..20: mol_type = other RNA
ctaaaattaaaacaaaaatt

SEQ ID NO: 1128 - RNA, 20 nt, synthetic construct
  misc_feature 1..20: note = source = /note="Description of Artificial Sequence: Synthetic oligonucleotide"
  source 1..20: mol_type = other RNA
tttaccattaatgctgttca

SEQ ID NO: 1129 - RNA, 20 nt, synthetic construct
  misc_feature 1..20: note = source = /note="Description of Artificial Sequence: Synthetic oligonucleotide"
  source 1..20: mol_type = other RNA
gtaaactatcgagaaaacta

SEQ ID NO: 1130 - RNA, 20 nt, synthetic construct
  misc_feature 1..20: note = source = /note="Description of Artificial Sequence: Synthetic oligonucleotide"
  source 1..20: mol_type = other RNA
acaaactaatatttactttt

SEQ ID NO: 1131 - RNA, 20 nt, synthetic construct
  misc_feature 1..20: note = source = /note="Description of Artificial Sequence: Synthetic oligonucleotide"
  source 1..20: mol_type = other RNA
caaactaatatttacttttt

SEQ ID NO: 1132 - RNA, 20 nt, synthetic construct
  misc_feature 1..20: note = source = /note="Description of Artificial Sequence: Synthetic oligonucleotide"
  source 1..20: mol_type = other RNA
aaactaatatttactttttg

SEQ ID NO: 1133 - RNA, 20 nt, synthetic construct
  misc_feature 1..20: note = source = /note="Description of Artificial Sequence: Synthetic oligonucleotide"
  source 1..20: mol_type = other RNA
ggacaacttttcaaatgttg

SEQ ID NO: 1134 - RNA, 20 nt, synthetic construct
  misc_feature 1..20: note = source = /note="Description of Artificial Sequence: Synthetic oligonucleotide"
  source 1..20: mol_type = other RNA
ttgtggtatatactgtcttc

SEQ ID NO: 1135 - RNA, 20 nt, synthetic construct
  misc_feature 1..20: note = source = /note="Description of Artificial Sequence: Synthetic oligonucleotide"
  source 1..20: mol_type = other RNA
ataaataagaataactacat

SEQ ID NO: 1136 - RNA, 20 nt, synthetic construct
  misc_feature 1..20: note = source = /note="Description of Artificial Sequence: Synthetic oligonucleotide"
  source 1..20: mol_type = other RNA
aattttgaatacaactatga

SEQ ID NO: 1137 - RNA, 20 nt, synthetic construct
  misc_feature 1..20: note = source = /note="Description of Artificial Sequence: Synthetic oligonucleotide"
  source 1..20: mol_type = other RNA
aaagtatttcagtgattata

SEQ ID NO: 1138 - RNA, 20 nt, synthetic construct
  misc_feature 1..20: note = source = /note="Description of Artificial Sequence: Synthetic oligonucleotide"
  source 1..20: mol_type = other RNA
ttagtcactttatcctttgt

SEQ ID NO: 1139 - RNA, 20 nt, synthetic construct
  misc_feature 1..20: note = source = /note="Description of Artificial Sequence: Synthetic oligonucleotide"
  source 1..20: mol_type = other RNA
agaaattattttaataagta

SEQ ID NO: 1140 - RNA, 20 nt, synthetic construct
  misc_feature 1..20: note = source = /note="Description of Artificial Sequence: Synthetic oligonucleotide"
  source 1..20: mol_type = other RNA
gaaattattttaataagtat

SEQ ID NO: 1141 - RNA, 20 nt, synthetic construct
  misc_feature 1..20: note = source = /note="Description of Artificial Sequence: Synthetic oligonucleotide"
  source 1..20: mol_type = other RNA
aaattattttaataagtatg

SEQ ID NO: 1142 - RNA, 20 nt, synthetic construct
  misc_feature 1..20: note = source = /note="Description of Artificial Sequence: Synthetic oligonucleotide"
  source 1..20: mol_type = other RNA
tatatgtgatcatactacct

SEQ ID NO: 1143 - RNA, 20 nt, synthetic construct
  misc_feature 1..20: note = source = /note="Description of Artificial Sequence: Synthetic oligonucleotide"
  source 1..20: mol_type = other RNA
aggtgctccaaaaattccat

SEQ ID NO: 1144 - RNA, 20 nt, synthetic construct
  misc_feature 1..20: note = source = /note="Description of Artificial Sequence: Synthetic oligonucleotide"
  source 1..20: mol_type = other RNA
aaaattccataggactgtct

SEQ ID NO: 1145 - RNA, 20 nt, synthetic construct
  misc_feature 1..20: note = source = /note="Description of Artificial Sequence: Synthetic oligonucleotide"
  source 1..20: mol_type = other RNA
aaattccataggactgtctt

SEQ ID NO: 1146 - RNA, 20 nt, synthetic construct
  misc_feature 1..20: note = source = /note="Description of Artificial Sequence: Synthetic oligonucleotide"
  source 1..20: mol_type = other RNA
gtcttgggttattgaatttt

SEQ ID NO: 1147 - RNA, 20 nt, synthetic construct
  misc_feature 1..20: note = source = /note="Description of Artificial Sequence: Synthetic oligonucleotide"
  source 1..20: mol_type = other RNA
gaattttaggaacatgataa

SEQ ID NO: 1148 - RNA, 20 nt, synthetic construct
  misc_feature 1..20: note = source = /note="Description of Artificial Sequence: Synthetic oligonucleotide"
  source 1..20: mol_type = other RNA
tatttgccaaactcttctta

SEQ ID NO: 1149 - RNA, 20 nt, synthetic construct
  misc_feature 1..20: note = source = /note="Description of Artificial Sequence: Synthetic oligonucleotide"
  source 1..20: mol_type = other RNA
ctcttcttaaggctttaatt

SEQ ID NO: 1150 - RNA, 20 nt, synthetic construct
  misc_feature 1..20: note = source = /note="Description of Artificial Sequence: Synthetic oligonucleotide"
  source 1..20: mol_type = other RNA
tgccagtttatgccagaagc

SEQ ID NO: 1151 - RNA, 20 nt, synthetic construct
  misc_feature 1..20: note = source = /note="Description of Artificial Sequence: Synthetic oligonucleotide"
  source 1..20: mol_type = other RNA
cagtttatgccagaagccgg

SEQ ID NO: 1152 - RNA, 20 nt, synthetic construct
  misc_feature 1..20: note = source = /note="Description of Artificial Sequence: Synthetic oligonucleotide"
  source 1..20: mol_type = other RNA
gaggaattgatatgattttg

SEQ ID NO: 1153 - RNA, 20 nt, synthetic construct
  misc_feature 1..20: note = source = /note="Description of Artificial Sequence: Synthetic oligonucleotide"
  source 1..20: mol_type = other RNA
ttgatatgattttgaggcag

SEQ ID NO: 1154 - RNA, 20 nt, synthetic construct
  misc_feature 1..20: note = source = /note="Description of Artificial Sequence: Synthetic oligonucleotide"
  source 1..20: mol_type = other RNA
gattttgaggcagtggcaca

SEQ ID NO: 1155 - RNA, 20 nt, synthetic construct
  misc_feature 1..20: note = source = /note="Description of Artificial Sequence: Synthetic oligonucleotide"
  source 1..20: mol_type = other RNA
cacatggtcctactagacat

SEQ ID NO: 1156 - RNA, 20 nt, synthetic construct
  misc_feature 1..20: note = source = /note="Description of Artificial Sequence: Synthetic oligonucleotide"
  source 1..20: mol_type = other RNA
caagtgaagtgcacctgcca

SEQ ID NO: 1157 - RNA, 20 nt, synthetic construct
  misc_feature 1..20: note = source = /note="Description of Artificial Sequence: Synthetic oligonucleotide"
  source 1..20: mol_type = other RNA
aagaattccaaagtccttat

SEQ ID NO: 1158 - RNA, 20 nt, synthetic construct
  misc_feature 1..20: note = source = /note="Description of Artificial Sequence: Synthetic oligonucleotide"
  source 1..20: mol_type = other RNA
agaattccaaagtccttatt

SEQ ID NO: 1159 - RNA, 20 nt, synthetic construct
  misc_feature 1..20: note = source = /note="Description of Artificial Sequence: Synthetic oligonucleotide"
  source 1..20: mol_type = other RNA
ccaaagtccttattgggcac

SEQ ID NO: 1160 - RNA, 20 nt, synthetic construct
  misc_feature 1..20: note = source = /note="Description of Artificial Sequence: Synthetic oligonucleotide"
  source 1..20: mol_type = other RNA
ttgggcactggtcttgtatt

SEQ ID NO: 1161 - RNA, 20 nt, synthetic construct
  misc_feature 1..20: note = source = /note="Description of Artificial Sequence: Synthetic oligonucleotide"
  source 1..20: mol_type = other RNA
ttgtattaggtaacaacaac

SEQ ID NO: 1162 - RNA, 20 nt, synthetic construct
  misc_feature 1..20: note = source = /note="Description of Artificial Sequence: Synthetic oligonucleotide"
  source 1..20: mol_type = other RNA
aagcccttcttatgattcat

SEQ ID NO: 1163 - RNA, 20 nt, synthetic construct
  misc_feature 1..20: note = source = /note="Description of Artificial Sequence: Synthetic oligonucleotide"
  source 1..20: mol_type = other RNA
atcctgcccaaagtctgagt

SEQ ID NO: 1164 - RNA, 20 nt, synthetic construct
  misc_feature 1..20: note = source = /note="Description of Artificial Sequence: Synthetic oligonucleotide"
  source 1..20: mol_type = other RNA
taaaatatcttcaaaagtta

SEQ ID NO: 1165 - RNA, 20 nt, synthetic construct
  misc_feature 1..20: note = source = /note="Description of Artificial Sequence: Synthetic oligonucleotide"
  source 1..20: mol_type = other RNA
atctagcaatttcaaatcgc

SEQ ID NO: 1166 - RNA, 20 nt, synthetic construct
  misc_feature 1..20: note = source = /note="Description of Artificial Sequence: Synthetic oligonucleotide"
  source 1..20: mol_type = other RNA
aatgttattgtttcctacct

SEQ ID NO: 1167 - RNA, 20 nt, synthetic construct
  misc_feature 1..20: note = source = /note="Description of Artificial Sequence: Synthetic oligonucleotide"
  source 1..20: mol_type = other RNA
atgttattgtttcctacctt

SEQ ID NO: 1168 - RNA, 20 nt, synthetic construct
  misc_feature 1..20: note = source = /note="Description of Artificial Sequence: Synthetic oligonucleotide"
  source 1..20: mol_type = other RNA
ttgtttcctaccttgggaac

SEQ ID NO: 1169 - RNA, 20 nt, synthetic construct
  misc_feature 1..20: note = source = /note="Description of Artificial Sequence: Synthetic oligonucleotide"
  source 1..20: mol_type = other RNA
ttgggaacaggctaaaactt

SEQ ID NO: 1170 - RNA, 20 nt, synthetic construct
  misc_feature 1..20: note = source = /note="Description of Artificial Sequence: Synthetic oligonucleotide"
  source 1..20: mol_type = other RNA
ccattgcacagtagttctta

SEQ ID NO: 1171 - RNA, 20 nt, synthetic construct
  misc_feature 1..20: note = source = /note="Description of Artificial Sequence: Synthetic oligonucleotide"
  source 1..20: mol_type = other RNA
gtagttcttaaggatagtaa

SEQ ID NO: 1172 - RNA, 20 nt, synthetic construct
  misc_feature 1..20: note = source = /note="Description of Artificial Sequence: Synthetic oligonucleotide"
  source 1..20: mol_type = other RNA
tcccaagccaactttacaat

SEQ ID NO: 1173 - RNA, 20 nt, synthetic construct
  misc_feature 1..20: note = source = /note="Description of Artificial Sequence: Synthetic oligonucleotide"
  source 1..20: mol_type = other RNA
tacaattggagccttcactg

SEQ ID NO: 1174 - RNA, 20 nt, synthetic construct
  misc_feature 1..20: note = source = /note="Description of Artificial Sequence: Synthetic oligonucleotide"
  source 1..20: mol_type = other RNA
acaattggagccttcactgt

SEQ ID NO: 1175 - RNA, 20 nt, synthetic construct
  misc_feature 1..20: note = source = /note="Description of Artificial Sequence: Synthetic oligonucleotide"
  source 1..20: mol_type = other RNA
gaccagttgccaagtagagc

SEQ ID NO: 1176 - RNA, 20 nt, synthetic construct
  misc_feature 1..20: note = source = /note="Description of Artificial Sequence: Synthetic oligonucleotide"
  source 1..20: mol_type = other RNA
cagttgccaagtagagctgg

SEQ ID NO: 1177 - RNA, 20 nt, synthetic construct
  misc_feature 1..20: note = source = /note="Description of Artificial Sequence: Synthetic oligonucleotide"
  source 1..20: mol_type = other RNA
aagtagagctggtggttatc

SEQ ID NO: 1178 - RNA, 20 nt, synthetic construct
  misc_feature 1..20: note = source = /note="Description of Artificial Sequence: Synthetic oligonucleotide"
  source 1..20: mol_type = other RNA
agtagagctggtggttatct

SEQ ID NO: 1179 - RNA, 20 nt, synthetic construct
  misc_feature 1..20: note = source = /note="Description of Artificial Sequence: Synthetic oligonucleotide"
  source 1..20: mol_type = other RNA
ccaaatatacagtatttact

SEQ ID NO: 1180 - RNA, 20 nt, synthetic construct
  misc_feature 1..20: note = source = /note="Description of Artificial Sequence: Synthetic oligonucleotide"
  source 1..20: mol_type = other RNA
gaatactgtgacattattga

SEQ ID NO: 1181 - RNA, 20 nt, synthetic construct
  misc_feature 1..20: note = source = /note="Description of Artificial Sequence: Synthetic oligonucleotide"
  source 1..20: mol_type = other RNA
tactgtgacattattgaagg

SEQ ID NO: 1182 - RNA, 20 nt, synthetic construct
  misc_feature 1..20: note = source = /note="Description of Artificial Sequence: Synthetic oligonucleotide"
  source 1..20: mol_type = other RNA
aggttatgcagtacatctgt

SEQ ID NO: 1183 - RNA, 20 nt, synthetic construct
  misc_feature 1..20: note = source = /note="Description of Artificial Sequence: Synthetic oligonucleotide"
  source 1..20: mol_type = other RNA
atgcagtacatctgttggtt

SEQ ID NO: 1184 - RNA, 20 nt, synthetic construct
  misc_feature 1..20: note = source = /note="Description of Artificial Sequence: Synthetic oligonucleotide"
  source 1..20: mol_type = other RNA
ctgttggtttggtatatagt

SEQ ID NO: 1185 - RNA, 20 nt, synthetic construct
  misc_feature 1..20: note = source = /note="Description of Artificial Sequence: Synthetic oligonucleotide"
  source 1..20: mol_type = other RNA
ttggtatatagtaggagaga

SEQ ID NO: 1186 - RNA, 20 nt, synthetic construct
  misc_feature 1..20: note = source = /note="Description of Artificial Sequence: Synthetic oligonucleotide"
  source 1..20: mol_type = other RNA
tggtatatagtaggagagaa

SEQ ID NO: 1187 - RNA, 20 nt, synthetic construct
  misc_feature 1..20: note = source = /note="Description of Artificial Sequence: Synthetic oligonucleotide"
  source 1..20: mol_type = other RNA
tagtaggagagaagggttcc

SEQ ID NO: 1188 - RNA, 20 nt, synthetic construct
  misc_feature 1..20: note = source = /note="Description of Artificial Sequence: Synthetic oligonucleotide"
  source 1..20: mol_type = other RNA
taggagagaagggttccagg

SEQ ID NO: 1189 - RNA, 20 nt, synthetic construct
  misc_feature 1..20: note = source = /note="Description of Artificial Sequence: Synthetic oligonucleotide"
  source 1..20: mol_type = other RNA
aggagagaagggttccagga

SEQ ID NO: 1190 - RNA, 20 nt, synthetic construct
  misc_feature 1..20: note = source = /note="Description of Artificial Sequence: Synthetic oligonucleotide"
  source 1..20: mol_type = other RNA
agaagggttccaggagggaa

SEQ ID NO: 1191 - RNA, 20 nt, synthetic construct
  misc_feature 1..20: note = source = /note="Description of Artificial Sequence: Synthetic oligonucleotide"
  source 1..20: mol_type = other RNA
gaagggttccaggagggaaa

SEQ ID NO: 1192 - RNA, 20 nt, synthetic construct
  misc_feature 1..20: note = source = /note="Description of Artificial Sequence: Synthetic oligonucleotide"
  source 1..20: mol_type = other RNA
aagggttccaggagggaaag

SEQ ID NO: 1193 - RNA, 20 nt, synthetic construct
  misc_feature 1..20: note = source = /note="Description of Artificial Sequence: Synthetic oligonucleotide"
  source 1..20: mol_type = other RNA
ttctcaaaagaatagatatt

SEQ ID NO: 1194 - RNA, 20 nt, synthetic construct
  misc_feature 1..20: note = source = /note="Description of Artificial Sequence: Synthetic oligonucleotide"
  source 1..20: mol_type = other RNA
ccattccaaataacaaattt

SEQ ID NO: 1195 - RNA, 20 nt, synthetic construct
  misc_feature 1..20: note = source = /note="Description of Artificial Sequence: Synthetic oligonucleotide"
  source 1..20: mol_type = other RNA
tccaaataacaaattttgga

SEQ ID NO: 1196 - RNA, 20 nt, synthetic construct
  misc_feature 1..20: note = source = /note="Description of Artificial Sequence: Synthetic oligonucleotide"
  source 1..20: mol_type = other RNA
ccaaataacaaattttggat

SEQ ID NO: 1197 - RNA, 20 nt, synthetic construct
  misc_feature 1..20: note = source = /note="Description of Artificial Sequence: Synthetic oligonucleotide"
  source 1..20: mol_type = other RNA
taacaaattttggatgggcg

SEQ ID NO: 1198 - RNA, 20 nt, synthetic construct
  misc_feature 1..20: note = source = /note="Description of Artificial Sequence: Synthetic oligonucleotide"
  source 1..20: mol_type = other RNA
tgcctgtaatcctagcactt

SEQ ID NO: 1199 - RNA, 20 nt, synthetic construct
  misc_feature 1..20: note = source = /note="Description of Artificial Sequence: Synthetic oligonucleotide"
  source 1..20: mol_type = other RNA
gcctgtaatcctagcacttt

SEQ ID NO: 1200 - RNA, 20 nt, synthetic construct
  misc_feature 1..20: note = source = /note="Description of Artificial Sequence: Synthetic oligonucleotide"
  source 1..20: mol_type = other RNA
tgtaatcctagcactttggg

SEQ ID NO: 1201 - RNA, 20 nt, synthetic construct
  misc_feature 1..20: note = source = /note="Description of Artificial Sequence: Synthetic oligonucleotide"
  source 1..20: mol_type = other RNA
cctagcactttgggaggcca

SEQ ID NO: 1202 - RNA, 20 nt, synthetic construct
  misc_feature 1..20: note = source = /note="Description of Artificial Sequence: Synthetic oligonucleotide"
  source 1..20: mol_type = other RNA
ccaaggtgagagatcacttg

SEQ ID NO: 1203 - RNA, 20 nt, synthetic construct
  misc_feature 1..20: note = source = /note="Description of Artificial Sequence: Synthetic oligonucleotide"
  source 1..20: mol_type = other RNA
gtgagagatcacttgaggcc

SEQ ID NO: 1204 - RNA, 20 nt, synthetic construct
  misc_feature 1..20: note = source = /note="Description of Artificial Sequence: Synthetic oligonucleotide"
  source 1..20: mol_type = other RNA
ccaggagtttgaaaccaccc

SEQ ID NO: 1205 - RNA, 20 nt, synthetic construct
  misc_feature 1..20: note = source = /note="Description of Artificial Sequence: Synthetic oligonucleotide"
  source 1..20: mol_type = other RNA
caggagtttgaaaccaccct

SEQ ID NO: 1206 - RNA, 20 nt, synthetic construct
  misc_feature 1..20: note = source = /note="Description of Artificial Sequence: Synthetic oligonucleotide"
  source 1..20: mol_type = other RNA
ccaccctgggcaacacagtc

SEQ ID NO: 1207 - RNA, 20 nt, synthetic construct
  misc_feature 1..20: note = source = /note="Description of Artificial Sequence: Synthetic oligonucleotide"
  source 1..20: mol_type = other RNA
caaaaaatttaaaaagttag

SEQ ID NO: 1208 - RNA, 20 nt, synthetic construct
  misc_feature 1..20: note = source = /note="Description of Artificial Sequence: Synthetic oligonucleotide"
  source 1..20: mol_type = other RNA
aaaaaatttaaaaagttagt

SEQ ID NO: 1209 - RNA, 20 nt, synthetic construct
  misc_feature 1..20: note = source = /note="Description of Artificial Sequence: Synthetic oligonucleotide"
  source 1..20: mol_type = other RNA
aaaaatttaaaaagttagtg

SEQ ID NO: 1210 - RNA, 20 nt, synthetic construct
  misc_feature 1..20: note = source = /note="Description of Artificial Sequence: Synthetic oligonucleotide"
  source 1..20: mol_type = other RNA
tttaaaaagttagtggggca

SEQ ID NO: 1211 - RNA, 20 nt, synthetic construct
  misc_feature 1..20: note = source = /note="Description of Artificial Sequence: Synthetic oligonucleotide"
  source 1..20: mol_type = other RNA
aaaaagttagtggggcatgg

SEQ ID NO: 1212 - RNA, 20 nt, synthetic construct
  misc_feature 1..20: note = source = /note="Description of Artificial Sequence: Synthetic oligonucleotide"
  source 1..20: mol_type = other RNA
tcctgtagtcccagctactc

SEQ ID NO: 1213 - RNA, 20 nt, synthetic construct
  misc_feature 1..20: note = source = /note="Description of Artificial Sequence: Synthetic oligonucleotide"
  source 1..20: mol_type = other RNA
gctactcaggagactgagat

SEQ ID NO: 1214 - RNA, 20 nt, synthetic construct
  misc_feature 1..20: note = source = /note="Description of Artificial Sequence: Synthetic oligonucleotide"
  source 1..20: mol_type = other RNA
actcaggagactgagatagg

SEQ ID NO: 1215 - RNA, 20 nt, synthetic construct
  misc_feature 1..20: note = source = /note="Description of Artificial Sequence: Synthetic oligonucleotide"
  source 1..20: mol_type = other RNA
aggagactgagataggagga

SEQ ID NO: 1216 - RNA, 20 nt, synthetic construct
  misc_feature 1..20: note = source = /note="Description of Artificial Sequence: Synthetic oligonucleotide"
  source 1..20: mol_type = other RNA
acaccactgcgctccagccc

SEQ ID NO: 1217 - RNA, 20 nt, synthetic construct
  misc_feature 1..20: note = source = /note="Description of Artificial Sequence: Synthetic oligonucleotide"
  source 1..20: mol_type = other RNA
tgcgctccagcccaggcaag

SEQ ID NO: 1218 - RNA, 20 nt, synthetic construct
  misc_feature 1..20: note = source = /note="Description of Artificial Sequence: Synthetic oligonucleotide"
  source 1..20: mol_type = other RNA
gcgctccagcccaggcaaga

SEQ ID NO: 1219 - RNA, 20 nt, synthetic construct
  misc_feature 1..20: note = source = /note="Description of Artificial Sequence: Synthetic oligonucleotide"
  source 1..20: mol_type = other RNA
aaaaagaagaaacagatagt

SEQ ID NO: 1220 - RNA, 20 nt, synthetic construct
  misc_feature 1..20: note = source = /note="Description of Artificial Sequence: Synthetic oligonucleotide"
  source 1..20: mol_type = other RNA
aagaagaaacagatagtagg

SEQ ID NO: 1221 - RNA, 20 nt, synthetic construct
  misc_feature 1..20: note = source = /note="Description of Artificial Sequence: Synthetic oligonucleotide"
  source 1..20: mol_type = other RNA
gttttaagaattcagaactc

SEQ ID NO: 1222 - RNA, 20 nt, synthetic construct
  misc_feature 1..20: note = source = /note="Description of Artificial Sequence: Synthetic oligonucleotide"
  source 1..20: mol_type = other RNA
aagaattcagaactcaggcc

SEQ ID NO: 1223 - RNA, 20 nt, synthetic construct
  misc_feature 1..20: note = source = /note="Description of Artificial Sequence: Synthetic oligonucleotide"
  source 1..20: mol_type = other RNA
ttcagaactcaggccaggtg

SEQ ID NO: 1224 - RNA, 20 nt, synthetic construct
  misc_feature 1..20: note = source = /note="Description of Artificial Sequence: Synthetic oligonucleotide"
  source 1..20: mol_type = other RNA
agaactcaggccaggtgtgg

SEQ ID NO: 1225 - RNA, 20 nt, synthetic construct
  misc_feature 1..20: note = source = /note="Description of Artificial Sequence: Synthetic oligonucleotide"
  source 1..20: mol_type = other RNA
ccaggtgtggtggctcattc

SEQ ID NO: 1226 - RNA, 20 nt, synthetic construct
  misc_feature 1..20: note = source = /note="Description of Artificial Sequence: Synthetic oligonucleotide"
  source 1..20: mol_type = other RNA
caggtgtggtggctcattct

SEQ ID NO: 1227 - RNA, 20 nt, synthetic construct
  misc_feature 1..20: note = source = /note="Description of Artificial Sequence: Synthetic oligonucleotide"
  source 1..20: mol_type = other RNA
gtgtggtggctcattctggg

SEQ ID NO: 1228 - RNA, 20 nt, synthetic construct
  misc_feature 1..20: note = source = /note="Description of Artificial Sequence: Synthetic oligonucleotide"
  source 1..20: mol_type = other RNA
tgtggtggctcattctggga

SEQ ID NO: 1229 - RNA, 20 nt, synthetic construct
  misc_feature 1..20: note = source = /note="Description of Artificial Sequence: Synthetic oligonucleotide"
  source 1..20: mol_type = other RNA
gtggtggctcattctgggag

SEQ ID NO: 1230 - RNA, 20 nt, synthetic construct
  misc_feature 1..20: note = source = /note="Description of Artificial Sequence: Synthetic oligonucleotide"
  source 1..20: mol_type = other RNA
tggctcattctgggagggga

SEQ ID NO: 1231 - RNA, 20 nt, synthetic construct
  misc_feature 1..20: note = source = /note="Description of Artificial Sequence: Synthetic oligonucleotide"
  source 1..20: mol_type = other RNA
tcattctgggaggggaaggc

SEQ ID NO: 1232 - RNA, 20 nt, synthetic construct
  misc_feature 1..20: note = source = /note="Description of Artificial Sequence: Synthetic oligonucleotide"
  source 1..20: mol_type = other RNA
ttctgggaggggaaggcagg

SEQ ID NO: 1233 - RNA, 20 nt, synthetic construct
  misc_feature 1..20: note = source = /note="Description of Artificial Sequence: Synthetic oligonucleotide"
  source 1..20: mol_type = other RNA
gaaggcaggaggatcacttg

SEQ ID NO: 1234 - RNA, 20 nt, synthetic construct
  misc_feature 1..20: note = source = /note="Description of Artificial Sequence: Synthetic oligonucleotide"
  source 1..20: mol_type = other RNA
ccagaagttctagaccagcc

SEQ ID NO: 1235 - RNA, 20 nt, synthetic construct
  misc_feature 1..20: note = source = /note="Description of Artificial Sequence: Synthetic oligonucleotide"
  source 1..20: mol_type = other RNA
cagaagttctagaccagcct

SEQ ID NO: 1236 - RNA, 20 nt, synthetic construct
  misc_feature 1..20: note = source = /note="Description of Artificial Sequence: Synthetic oligonucleotide"
  source 1..20: mol_type = other RNA
gagaattaaagtaagagacg

SEQ ID NO: 1237 - RNA, 20 nt, synthetic construct
  misc_feature 1..20: note = source = /note="Description of Artificial Sequence: Synthetic oligonucleotide"
  source 1..20: mol_type = other RNA
attaaagtaagagacgaggc

SEQ ID NO: 1238 - RNA, 20 nt, synthetic construct
  misc_feature 1..20: note = source = /note="Description of Artificial Sequence: Synthetic oligonucleotide"
  source 1..20: mol_type = other RNA
gtaagagacgaggccggttg

SEQ ID NO: 1239 - RNA, 20 nt, synthetic construct
  misc_feature 1..20: note = source = /note="Description of Artificial Sequence: Synthetic oligonucleotide"
  source 1..20: mol_type = other RNA
agagacgaggccggttgtgg

SEQ ID NO: 1240 - RNA, 20 nt, synthetic construct
  misc_feature 1..20: note = source = /note="Description of Artificial Sequence: Synthetic oligonucleotide"
  source 1..20: mol_type = other RNA
tgcctgtaatcccagcactt

SEQ ID NO: 1241 - RNA, 20 nt, synthetic construct
  misc_feature 1..20: note = source = /note="Description of Artificial Sequence: Synthetic oligonucleotide"
  source 1..20: mol_type = other RNA
gcctgtaatcccagcacttt

SEQ ID NO: 1242 - RNA, 20 nt, synthetic construct
  misc_feature 1..20: note = source = /note="Description of Artificial Sequence: Synthetic oligonucleotide"
  source 1..20: mol_type = other RNA
cccagcactttgggacgaca

SEQ ID NO: 1243 - RNA, 20 nt, synthetic construct
  misc_feature 1..20: note = source = /note="Description of Artificial Sequence: Synthetic oligonucleotide"
  source 1..20: mol_type = other RNA
gcactttgggacgacaaggc

SEQ ID NO: 1244 - RNA, 20 nt, synthetic construct
  misc_feature 1..20: note = source = /note="Description of Artificial Sequence: Synthetic oligonucleotide"
  source 1..20: mol_type = other RNA
ctttgggacgacaaggcagg

SEQ ID NO: 1245 - RNA, 20 nt, synthetic construct
  misc_feature 1..20: note = source = /note="Description of Artificial Sequence: Synthetic oligonucleotide"
  source 1..20: mol_type = other RNA
caaggcaggtggatgacctg

SEQ ID NO: 1246 - RNA, 20 nt, synthetic construct
  misc_feature 1..20: note = source = /note="Description of Artificial Sequence: Synthetic oligonucleotide"
  source 1..20: mol_type = other RNA
caggtggatgacctgaggtc

SEQ ID NO: 1247 - RNA, 20 nt, synthetic construct
  misc_feature 1..20: note = source = /note="Description of Artificial Sequence: Synthetic oligonucleotide"
  source 1..20: mol_type = other RNA
tcaggagtttgagaccagcc

SEQ ID NO: 1248 - RNA, 20 nt, synthetic construct
  misc_feature 1..20: note = source = /note="Description of Artificial Sequence: Synthetic oligonucleotide"
  source 1..20: mol_type = other RNA
tgagaccagcctggccaaca

SEQ ID NO: 1249 - RNA, 20 nt, synthetic construct
  misc_feature 1..20: note = source = /note="Description of Artificial Sequence: Synthetic oligonucleotide"
  source 1..20: mol_type = other RNA
ctaaaaatacaaaaattagc

SEQ ID NO: 1250 - RNA, 20 nt, synthetic construct
  misc_feature 1..20: note = source = /note="Description of Artificial Sequence: Synthetic oligonucleotide"
  source 1..20: mol_type = other RNA
taaaaatacaaaaattagcc

SEQ ID NO: 1251 - RNA, 20 nt, synthetic construct
  misc_feature 1..20: note = source = /note="Description of Artificial Sequence: Synthetic oligonucleotide"
  source 1..20: mol_type = other RNA
atacaaaaattagccgggca

SEQ ID NO: 1252 - RNA, 20 nt, synthetic construct
  misc_feature 1..20: note = source = /note="Description of Artificial Sequence: Synthetic oligonucleotide"
  source 1..20: mol_type = other RNA
caaaaattagccgggcatgg

SEQ ID NO: 1253 - RNA, 20 nt, synthetic construct
  misc_feature 1..20: note = source = /note="Description of Artificial Sequence: Synthetic oligonucleotide"
  source 1..20: mol_type = other RNA
accagtaatcccagctactc

SEQ ID NO: 1254 - RNA, 20 nt, synthetic construct
  misc_feature 1..20: note = source = /note="Description of Artificial Sequence: Synthetic oligonucleotide"
  source 1..20: mol_type = other RNA
agtaatcccagctactcagg

SEQ ID NO: 1255 - RNA, 20 nt, synthetic construct
  misc_feature 1..20: note = source = /note="Description of Artificial Sequence: Synthetic oligonucleotide"
  source 1..20: mol_type = other RNA
cccagctactcaggaggctg

SEQ ID NO: 1256 - RNA, 20 nt, synthetic construct
  misc_feature 1..20: note = source = /note="Description of Artificial Sequence: Synthetic oligonucleotide"
  source 1..20: mol_type = other RNA
gcccgagaatcacttgagcc

SEQ ID NO: 1257 - RNA, 20 nt, synthetic construct
  misc_feature 1..20: note = source = /note="Description of Artificial Sequence: Synthetic oligonucleotide"
  source 1..20: mol_type = other RNA
cccgagaatcacttgagcct

SEQ ID NO: 1258 - RNA, 20 nt, synthetic construct
  misc_feature 1..20: note = source = /note="Description of Artificial Sequence: Synthetic oligonucleotide"
  source 1..20: mol_type = other RNA
gaatcacttgagcctgggca

SEQ ID NO: 1259 - RNA, 20 nt, synthetic construct
  misc_feature 1..20: note = source = /note="Description of Artificial Sequence: Synthetic oligonucleotide"
  source 1..20: mol_type = other RNA
tcacttgagcctgggcatgg

SEQ ID NO: 1260 - RNA, 20 nt, synthetic construct
  misc_feature 1..20: note = source = /note="Description of Artificial Sequence: Synthetic oligonucleotide"
  source 1..20: mol_type = other RNA
tacctataatcccagcactt

SEQ ID NO: 1261 - RNA, 20 nt, synthetic construct
  misc_feature 1..20: note = source = /note="Description of Artificial Sequence: Synthetic oligonucleotide"
  source 1..20: mol_type = other RNA
acctataatcccagcacttt

SEQ ID NO: 1262 - RNA, 20 nt, synthetic construct
  misc_feature 1..20: note = source = /note="Description of Artificial Sequence: Synthetic oligonucleotide"
  source 1..20: mol_type = other RNA
tataatcccagcactttggg

SEQ ID NO: 1263 - RNA, 20 nt, synthetic construct
  misc_feature 1..20: note = source = /note="Description of Artificial Sequence: Synthetic oligonucleotide"
  source 1..20: mol_type = other RNA
cccagcactttgggaggccg

SEQ ID NO: 1264 - RNA, 20 nt, synthetic construct
  misc_feature 1..20: note = source = /note="Description of Artificial Sequence: Synthetic oligonucleotide"
  source 1..20: mol_type = other RNA
gcactttgggaggccgaggc

SEQ ID NO: 1265 - RNA, 20 nt, synthetic construct
  misc_feature 1..20: note = source = /note="Description of Artificial Sequence: Synthetic oligonucleotide"
  source 1..20: mol_type = other RNA
ctttgggaggccgaggcagg

SEQ ID NO: 1266 - RNA, 20 nt, synthetic construct
  misc_feature 1..20: note = source = /note="Description of Artificial Sequence: Synthetic oligonucleotide"
  source 1..20: mol_type = other RNA
caggtggatcacctgacgtc

SEQ ID NO: 1267 - RNA, 20 nt, synthetic construct
  misc_feature 1..20: note = source = /note="Description of Artificial Sequence: Synthetic oligonucleotide"
  source 1..20: mol_type = other RNA
tcaggaattcgagaccagtc

SEQ ID NO: 1268 - RNA, 20 nt, synthetic construct
  misc_feature 1..20: note = source = /note="Description of Artificial Sequence: Synthetic oligonucleotide"
  source 1..20: mol_type = other RNA
cgagaccagtctggccaaca

SEQ ID NO: 1269 - RNA, 20 nt, synthetic construct
  misc_feature 1..20: note = source = /note="Description of Artificial Sequence: Synthetic oligonucleotide"
  source 1..20: mol_type = other RNA
actaaacatacaaaattagc

SEQ ID NO: 1270 - RNA, 20 nt, synthetic construct
  misc_feature 1..20: note = source = /note="Description of Artificial Sequence: Synthetic oligonucleotide"
  source 1..20: mol_type = other RNA
ctaaacatacaaaattagct

SEQ ID NO: 1271 - RNA, 20 nt, synthetic construct
  misc_feature 1..20: note = source = /note="Description of Artificial Sequence: Synthetic oligonucleotide"
  source 1..20: mol_type = other RNA
catacaaaattagctgggtg

SEQ ID NO: 1272 - RNA, 20 nt, synthetic construct
  misc_feature 1..20: note = source = /note="Description of Artificial Sequence: Synthetic oligonucleotide"
  source 1..20: mol_type = other RNA
acaaaattagctgggtgtgg

SEQ ID NO: 1273 - RNA, 20 nt, synthetic construct
  misc_feature 1..20: note = source = /note="Description of Artificial Sequence: Synthetic oligonucleotide"
  source 1..20: mol_type = other RNA
gcctgtagtctcagctattc

SEQ ID NO: 1274 - RNA, 20 nt, synthetic construct
  misc_feature 1..20: note = source = /note="Description of Artificial Sequence: Synthetic oligonucleotide"
  source 1..20: mol_type = other RNA
tgtagtctcagctattctgg

SEQ ID NO: 1275 - RNA, 20 nt, synthetic construct
  misc_feature 1..20: note = source = /note="Description of Artificial Sequence: Synthetic oligonucleotide"
  source 1..20: mol_type = other RNA
gctattctggaggctgatac

SEQ ID NO: 1276 - RNA, 20 nt, synthetic construct
  misc_feature 1..20: note = source = /note="Description of Artificial Sequence: Synthetic oligonucleotide"
  source 1..20: mol_type = other RNA
gagaattgcttgaaccctcc

SEQ ID NO: 1277 - RNA, 20 nt, synthetic construct
  misc_feature 1..20: note = source = /note="Description of Artificial Sequence: Synthetic oligonucleotide"
  source 1..20: mol_type = other RNA
agaattgcttgaaccctccc

SEQ ID NO: 1278 - RNA, 20 nt, synthetic construct
  misc_feature 1..20: note = source = /note="Description of Artificial Sequence: Synthetic oligonucleotide"
  source 1..20: mol_type = other RNA
attgcttgaaccctcccggg

SEQ ID NO: 1279 - RNA, 20 nt, synthetic construct
  misc_feature 1..20: note = source = /note="Description of Artificial Sequence: Synthetic oligonucleotide"
  source 1..20: mol_type = other RNA
tgaaccctcccgggaggcag

SEQ ID NO: 1280 - RNA, 20 nt, synthetic construct
  misc_feature 1..20: note = source = /note="Description of Artificial Sequence: Synthetic oligonucleotide"
  source 1..20: mol_type = other RNA
ctcccgggaggcagaggctg

SEQ ID NO: 1281 - RNA, 20 nt, synthetic construct
  misc_feature 1..20: note = source = /note="Description of Artificial Sequence: Synthetic oligonucleotide"
  source 1..20: mol_type = other RNA
gaggctgcggtgagccgaga

SEQ ID NO: 1282 - RNA, 20 nt, synthetic construct
  misc_feature 1..20: note = source = /note="Description of Artificial Sequence: Synthetic oligonucleotide"
  source 1..20: mol_type = other RNA
ggctctgctgcactccagcc

SEQ ID NO: 1283 - RNA, 20 nt, synthetic construct
  misc_feature 1..20: note = source = /note="Description of Artificial Sequence: Synthetic oligonucleotide"
  source 1..20: mol_type = other RNA
gctctgctgcactccagcct

SEQ ID NO: 1284 - RNA, 20 nt, synthetic construct
  misc_feature 1..20: note = source = /note="Description of Artificial Sequence: Synthetic oligonucleotide"
  source 1..20: mol_type = other RNA
gctgcactccagcctgggcg

SEQ ID NO: 1285 - RNA, 20 nt, synthetic construct
  misc_feature 1..20: note = source = /note="Description of Artificial Sequence: Synthetic oligonucleotide"
  source 1..20: mol_type = other RNA
gaaaaataataataataaat

SEQ ID NO: 1286 - RNA, 20 nt, synthetic construct
  misc_feature 1..20: note = source = /note="Description of Artificial Sequence: Synthetic oligonucleotide"
  source 1..20: mol_type = other RNA
taaataggagatgaataaat

SEQ ID NO: 1287 - RNA, 20 nt, synthetic construct
  misc_feature 1..20: note = source = /note="Description of Artificial Sequence: Synthetic oligonucleotide"
  source 1..20: mol_type = other RNA
aaataggagatgaataaatt

SEQ ID NO: 1288 - RNA, 20 nt, synthetic construct
  misc_feature 1..20: note = source = /note="Description of Artificial Sequence: Synthetic oligonucleotide"
  source 1..20: mol_type = other RNA
ttgggataaagtgtttttga

SEQ ID NO: 1289 - RNA, 20 nt, synthetic construct
  misc_feature 1..20: note = source = /note="Description of Artificial Sequence: Synthetic oligonucleotide"
  source 1..20: mol_type = other RNA
gtgtttttgaaggacagtct

SEQ ID NO: 1290 - RNA, 20 nt, synthetic construct
  misc_feature 1..20: note = source = /note="Description of Artificial Sequence: Synthetic oligonucleotide"
  source 1..20: mol_type = other RNA
gtctaggatataaaatgaac

SEQ ID NO: 1291 - RNA, 20 nt, synthetic construct
  misc_feature 1..20: note = source = /note="Description of Artificial Sequence: Synthetic oligonucleotide"
  source 1..20: mol_type = other RNA
tacatttcttttttgtctat

SEQ ID NO: 1292 - RNA, 20 nt, synthetic construct
  misc_feature 1..20: note = source = /note="Description of Artificial Sequence: Synthetic oligonucleotide"
  source 1..20: mol_type = other RNA
tttcttttttgtctattgga

SEQ ID NO: 1293 - RNA, 20 nt, synthetic construct
  misc_feature 1..20: note = source = /note="Description of Artificial Sequence: Synthetic oligonucleotide"
  source 1..20: mol_type = other RNA
ttttttgtctattggaaggt

SEQ ID NO: 1294 - RNA, 20 nt, synthetic construct
  misc_feature 1..20: note = source = /note="Description of Artificial Sequence: Synthetic oligonucleotide"
  source 1..20: mol_type = other RNA
acctctcagtcaatatttaa

SEQ ID NO: 1295 - RNA, 20 nt, synthetic construct
  misc_feature 1..20: note = source = /note="Description of Artificial Sequence: Synthetic oligonucleotide"
  source 1..20: mol_type = other RNA
ttttttttttttttttgaga

SEQ ID NO: 1296 - RNA, 20 nt, synthetic construct
  misc_feature 1..20: note = source = /note="Description of Artificial Sequence: Synthetic oligonucleotide"
  source 1..20: mol_type = other RNA
ggtatcttgctctgtcacct

SEQ ID NO: 1297 - RNA, 20 nt, synthetic construct
  misc_feature 1..20: note = source = /note="Description of Artificial Sequence: Synthetic oligonucleotide"
  source 1..20: mol_type = other RNA
tcttgctctgtcacctaggc

SEQ ID NO: 1298 - RNA, 20 nt, synthetic construct
  misc_feature 1..20: note = source = /note="Description of Artificial Sequence: Synthetic oligonucleotide"
  source 1..20: mol_type = other RNA
tcacctaggctggagtgcag

SEQ ID NO: 1299 - RNA, 20 nt, synthetic construct
  misc_feature 1..20: note = source = /note="Description of Artificial Sequence: Synthetic oligonucleotide"
  source 1..20: mol_type = other RNA
ggagtgcagtggtgtgatct

SEQ ID NO: 1300 - RNA, 20 nt, synthetic construct
  misc_feature 1..20: note = source = /note="Description of Artificial Sequence: Synthetic oligonucleotide"
  source 1..20: mol_type = other RNA
cactgcaacctctgccttcc

SEQ ID NO: 1301 - RNA, 20 nt, synthetic construct
  misc_feature 1..20: note = source = /note="Description of Artificial Sequence: Synthetic oligonucleotide"
  source 1..20: mol_type = other RNA
ttctcagcccccagagtagc

SEQ ID NO: 1302 - RNA, 20 nt, synthetic construct
  misc_feature 1..20: note = source = /note="Description of Artificial Sequence: Synthetic oligonucleotide"
  source 1..20: mol_type = other RNA
tctcagcccccagagtagct

SEQ ID NO: 1303 - RNA, 20 nt, synthetic construct
  misc_feature 1..20: note = source = /note="Description of Artificial Sequence: Synthetic oligonucleotide"
  source 1..20: mol_type = other RNA
cccccagagtagctgggact

SEQ ID NO: 1304 - RNA, 20 nt, synthetic construct
  misc_feature 1..20: note = source = /note="Description of Artificial Sequence: Synthetic oligonucleotide"
  source 1..20: mol_type = other RNA
ggagcgtgccccaccacacc

SEQ ID NO: 1305 - RNA, 20 nt, synthetic construct
  misc_feature 1..20: note = source = /note="Description of Artificial Sequence: Synthetic oligonucleotide"
  source 1..20: mol_type = other RNA
tttctatttttattagagac

SEQ ID NO: 1306 - RNA, 20 nt, synthetic construct
  misc_feature 1..20: note = source = /note="Description of Artificial Sequence: Synthetic oligonucleotide"
  source 1..20: mol_type = other RNA
ttctatttttattagagaca

SEQ ID NO: 1307 - RNA, 20 nt, synthetic construct
  misc_feature 1..20: note = source = /note="Description of Artificial Sequence: Synthetic oligonucleotide"
  source 1..20: mol_type = other RNA
gagacagggtttcaccatgt

SEQ ID NO: 1308 - RNA, 20 nt, synthetic construct
  misc_feature 1..20: note = source = /note="Description of Artificial Sequence: Synthetic oligonucleotide"
  source 1..20: mol_type = other RNA
agggtttcaccatgttggcc

SEQ ID NO: 1309 - RNA, 20 nt, synthetic construct
  misc_feature 1..20: note = source = /note="Description of Artificial Sequence: Synthetic oligonucleotide"
  source 1..20: mol_type = other RNA
ccaggctgatctcgtactcc

SEQ ID NO: 1310 - RNA, 20 nt, synthetic construct
  misc_feature 1..20: note = source = /note="Description of Artificial Sequence: Synthetic oligonucleotide"
  source 1..20: mol_type = other RNA
gatctcgtactcctggtctc

SEQ ID NO: 1311 - RNA, 20 nt, synthetic construct
  misc_feature 1..20: note = source = /note="Description of Artificial Sequence: Synthetic oligonucleotide"
  source 1..20: mol_type = other RNA
tctcaggtgatctgcctgcc

SEQ ID NO: 1312 - RNA, 20 nt, synthetic construct
  misc_feature 1..20: note = source = /note="Description of Artificial Sequence: Synthetic oligonucleotide"
  source 1..20: mol_type = other RNA
ctcaggtgatctgcctgccc

SEQ ID NO: 1313 - RNA, 20 nt, synthetic construct
  misc_feature 1..20: note = source = /note="Description of Artificial Sequence: Synthetic oligonucleotide"
  source 1..20: mol_type = other RNA
gcccgggtctcccaaagtgc

SEQ ID NO: 1314 - RNA, 20 nt, synthetic construct
  misc_feature 1..20: note = source = /note="Description of Artificial Sequence: Synthetic oligonucleotide"
  source 1..20: mol_type = other RNA
cccgggtctcccaaagtgct

SEQ ID NO: 1315 - RNA, 20 nt, synthetic construct
  misc_feature 1..20: note = source = /note="Description of Artificial Sequence: Synthetic oligonucleotide"
  source 1..20: mol_type = other RNA
tcccaaagtgctgggattac

SEQ ID NO: 1316 - RNA, 20 nt, synthetic construct
  misc_feature 1..20: note = source = /note="Description of Artificial Sequence: Synthetic oligonucleotide"
  source 1..20: mol_type = other RNA
caggcatgagccactgcacc

SEQ ID NO: 1317 - RNA, 20 nt, synthetic construct
  misc_feature 1..20: note = source = /note="Description of Artificial Sequence: Synthetic oligonucleotide"
  source 1..20: mol_type = other RNA
aaaaatagtgttaagtgtct

SEQ ID NO: 1318 - RNA, 20 nt, synthetic construct
  misc_feature 1..20: note = source = /note="Description of Artificial Sequence: Synthetic oligonucleotide"
  source 1..20: mol_type = other RNA
agtgttaagtgtcttggtga

SEQ ID NO: 1319 - RNA, 20 nt, synthetic construct
  misc_feature 1..20: note = source = /note="Description of Artificial Sequence: Synthetic oligonucleotide"
  source 1..20: mol_type = other RNA
tgtcttggtgatggtgatga

SEQ ID NO: 1320 - RNA, 20 nt, synthetic construct
  misc_feature 1..20: note = source = /note="Description of Artificial Sequence: Synthetic oligonucleotide"
  source 1..20: mol_type = other RNA
ttggtgatggtgatgatggt

SEQ ID NO: 1321 - RNA, 20 nt, synthetic construct
  misc_feature 1..20: note = source = /note="Description of Artificial Sequence: Synthetic oligonucleotide"
  source 1..20: mol_type = other RNA
ggtgatgatggtaggagtaa

SEQ ID NO: 1322 - RNA, 20 nt, synthetic construct
  misc_feature 1..20: note = source = /note="Description of Artificial Sequence: Synthetic oligonucleotide"
  source 1..20: mol_type = other RNA
tccttacatttaatttctac

SEQ ID NO: 1323 - RNA, 20 nt, synthetic construct
  misc_feature 1..20: note = source = /note="Description of Artificial Sequence: Synthetic oligonucleotide"
  source 1..20: mol_type = other RNA
catttaatttctacaggcta

SEQ ID NO: 1324 - RNA, 20 nt, synthetic construct
  misc_feature 1..20: note = source = /note="Description of Artificial Sequence: Synthetic oligonucleotide"
  source 1..20: mol_type = other RNA
attttaagcacaaaagtgaa

SEQ ID NO: 1325 - RNA, 20 nt, synthetic construct
  misc_feature 1..20: note = source = /note="Description of Artificial Sequence: Synthetic oligonucleotide"
  source 1..20: mol_type = other RNA
tggtttttagtaaacttata

SEQ ID NO: 1326 - RNA, 20 nt, synthetic construct
  misc_feature 1..20: note = source = /note="Description of Artificial Sequence: Synthetic oligonucleotide"
  source 1..20: mol_type = other RNA
ggtttttagtaaacttatat

SEQ ID NO: 1327 - RNA, 20 nt, synthetic construct
  misc_feature 1..20: note = source = /note="Description of Artificial Sequence: Synthetic oligonucleotide"
  source 1..20: mol_type = other RNA
acttgctcaatttcccccag

SEQ ID NO: 1328 - RNA, 20 nt, synthetic construct
  misc_feature 1..20: note = source = /note="Description of Artificial Sequence: Synthetic oligonucleotide"
  source 1..20: mol_type = other RNA
ccatgatactgacattgatg

SEQ ID NO: 1329 - RNA, 20 nt, synthetic construct
  misc_feature 1..20: note = source = /note="Description of Artificial Sequence: Synthetic oligonucleotide"
  source 1..20: mol_type = other RNA
aagtcctttttttgatagaa

SEQ ID NO: 1330 - RNA, 20 nt, synthetic construct
  misc_feature 1..20: note = source = /note="Description of Artificial Sequence: Synthetic oligonucleotide"
  source 1..20: mol_type = other RNA
ctcatcacaaccctagagat

SEQ ID NO: 1331 - RNA, 20 nt, synthetic construct
  misc_feature 1..20: note = source = /note="Description of Artificial Sequence: Synthetic oligonucleotide"
  source 1..20: mol_type = other RNA
cttatccctatttatgagtg

SEQ ID NO: 1332 - RNA, 20 nt, synthetic construct
  misc_feature 1..20: note = source = /note="Description of Artificial Sequence: Synthetic oligonucleotide"
  source 1..20: mol_type = other RNA
gaggaaactgaagcccagtg

SEQ ID NO: 1333 - RNA, 20 nt, synthetic construct
  misc_feature 1..20: note = source = /note="Description of Artificial Sequence: Synthetic oligonucleotide"
  source 1..20: mol_type = other RNA
aagttcatacagcctataca

SEQ ID NO: 1334 - RNA, 20 nt, synthetic construct
  misc_feature 1..20: note = source = /note="Description of Artificial Sequence: Synthetic oligonucleotide"
  source 1..20: mol_type = other RNA
atacagcctatacatggctt

SEQ ID NO: 1335 - RNA, 20 nt, synthetic construct
  misc_feature 1..20: note = source = /note="Description of Artificial Sequence: Synthetic oligonucleotide"
  source 1..20: mol_type = other RNA
agctgtaaaagtgtataatg

SEQ ID NO: 1336 - RNA, 20 nt, synthetic construct
  misc_feature 1..20: note = source = /note="Description of Artificial Sequence: Synthetic oligonucleotide"
  source 1..20: mol_type = other RNA
tatgtagagaaagtcataaa

SEQ ID NO: 1337 - RNA, 20 nt, synthetic construct
  misc_feature 1..20: note = source = /note="Description of Artificial Sequence: Synthetic oligonucleotide"
  source 1..20: mol_type = other RNA
cattacagcattattaataa

SEQ ID NO: 1338 - RNA, 20 nt, synthetic construct
  misc_feature 1..20: note = source = /note="Description of Artificial Sequence: Synthetic oligonucleotide"
  source 1..20: mol_type = other RNA
ttattaataatggtaaaaaa

SEQ ID NO: 1339 - RNA, 20 nt, synthetic construct
  misc_feature 1..20: note = source = /note="Description of Artificial Sequence: Synthetic oligonucleotide"
  source 1..20: mol_type = other RNA
atgagtgaataaacaaattg

SEQ ID NO: 1340 - RNA, 20 nt, synthetic construct
  misc_feature 1..20: note = source = /note="Description of Artificial Sequence: Synthetic oligonucleotide"
  source 1..20: mol_type = other RNA
aatattattaagtagtataa

SEQ ID NO: 1341 - RNA, 20 nt, synthetic construct
  misc_feature 1..20: note = source = /note="Description of Artificial Sequence: Synthetic oligonucleotide"
  source 1..20: mol_type = other RNA
tattaagtagtataaaggaa

SEQ ID NO: 1342 - RNA, 20 nt, synthetic construct
  misc_feature 1..20: note = source = /note="Description of Artificial Sequence: Synthetic oligonucleotide"
  source 1..20: mol_type = other RNA
attgataaatgctgtcacat

SEQ ID NO: 1343 - RNA, 20 nt, synthetic construct
  misc_feature 1..20: note = source = /note="Description of Artificial Sequence: Synthetic oligonucleotide"
  source 1..20: mol_type = other RNA
gtcacataggtgaatctgag

SEQ ID NO: 1344 - RNA, 20 nt, synthetic construct
  misc_feature 1..20: note = source = /note="Description of Artificial Sequence: Synthetic oligonucleotide"
  source 1..20: mol_type = other RNA
gaatctgagaggcacaagaa

SEQ ID NO: 1345 - RNA, 20 nt, synthetic construct
  misc_feature 1..20: note = source = /note="Description of Artificial Sequence: Synthetic oligonucleotide"
  source 1..20: mol_type = other RNA
ttttaagtaacgtccagaat

SEQ ID NO: 1346 - RNA, 20 nt, synthetic construct
  misc_feature 1..20: note = source = /note="Description of Artificial Sequence: Synthetic oligonucleotide"
  source 1..20: mol_type = other RNA
gtccagaataggcaaatcta

SEQ ID NO: 1347 - RNA, 20 nt, synthetic construct
  misc_feature 1..20: note = source = /note="Description of Artificial Sequence: Synthetic oligonucleotide"
  source 1..20: mol_type = other RNA
aatctaaggagacagaaagt

SEQ ID NO: 1348 - RNA, 20 nt, synthetic construct
  misc_feature 1..20: note = source = /note="Description of Artificial Sequence: Synthetic oligonucleotide"
  source 1..20: mol_type = other RNA
aaagttggctagttattact

SEQ ID NO: 1349 - RNA, 20 nt, synthetic construct
  misc_feature 1..20: note = source = /note="Description of Artificial Sequence: Synthetic oligonucleotide"
  source 1..20: mol_type = other RNA
aagttggctagttattacta

SEQ ID NO: 1350 - RNA, 20 nt, synthetic construct
  misc_feature 1..20: note = source = /note="Description of Artificial Sequence: Synthetic oligonucleotide"
  source 1..20: mol_type = other RNA
agttggctagttattactag

SEQ ID NO: 1351 - RNA, 20 nt, synthetic construct
  misc_feature 1..20: note = source = /note="Description of Artificial Sequence: Synthetic oligonucleotide"
  source 1..20: mol_type = other RNA
gctagttattactaggggct

SEQ ID NO: 1352 - RNA, 20 nt, synthetic construct
  misc_feature 1..20: note = source = /note="Description of Artificial Sequence: Synthetic oligonucleotide"
  source 1..20: mol_type = other RNA
ctagttattactaggggcta

SEQ ID NO: 1353 - RNA, 20 nt, synthetic construct
  misc_feature 1..20: note = source = /note="Description of Artificial Sequence: Synthetic oligonucleotide"
  source 1..20: mol_type = other RNA
ttattactaggggctaggga

SEQ ID NO: 1354 - RNA, 20 nt, synthetic construct
  misc_feature 1..20: note = source = /note="Description of Artificial Sequence: Synthetic oligonucleotide"
  source 1..20: mol_type = other RNA
tattactaggggctagggat

SEQ ID NO: 1355 - RNA, 20 nt, synthetic construct
  misc_feature 1..20: note = source = /note="Description of Artificial Sequence: Synthetic oligonucleotide"
  source 1..20: mol_type = other RNA
tactaggggctagggatggg

SEQ ID NO: 1356 - RNA, 20 nt, synthetic construct
  misc_feature 1..20: note = source = /note="Description of Artificial Sequence: Synthetic oligonucleotide"
  source 1..20: mol_type = other RNA
actaggggctagggatggga

SEQ ID NO: 1357 - RNA, 20 nt, synthetic construct
  misc_feature 1..20: note = source = /note="Description of Artificial Sequence: Synthetic oligonucleotide"
  source 1..20: mol_type = other RNA
aggggctagggatgggaggg

SEQ ID NO: 1358 - RNA, 20 nt, synthetic construct
  misc_feature 1..20: note = source = /note="Description of Artificial Sequence: Synthetic oligonucleotide"
  source 1..20: mol_type = other RNA
aataagtatgagatttcttt

SEQ ID NO: 1359 - RNA, 20 nt, synthetic construct
  misc_feature 1..20: note = source = /note="Description of Artificial Sequence: Synthetic oligonucleotide"
  source 1..20: mol_type = other RNA
actgaattatatgctttaaa

SEQ ID NO: 1360 - RNA, 20 nt, synthetic construct
  misc_feature 1..20: note = source = /note="Description of Artificial Sequence: Synthetic oligonucleotide"
  source 1..20: mol_type = other RNA
atgaatgtagttgagttatt

SEQ ID NO: 1361 - RNA, 20 nt, synthetic construct
  misc_feature 1..20: note = source = /note="Description of Artificial Sequence: Synthetic oligonucleotide"
  source 1..20: mol_type = other RNA
atctcatgcaaaagaaatgc

SEQ ID NO: 1362 - RNA, 20 nt, synthetic construct
  misc_feature 1..20: note = source = /note="Description of Artificial Sequence: Synthetic oligonucleotide"
  source 1..20: mol_type = other RNA
aaagaaatgcaggaactatt

SEQ ID NO: 1363 - RNA, 20 nt, synthetic construct
  misc_feature 1..20: note = source = /note="Description of Artificial Sequence: Synthetic oligonucleotide"
  source 1..20: mol_type = other RNA
ggaactatttggattgaatg

SEQ ID NO: 1364 - RNA, 20 nt, synthetic construct
  misc_feature 1..20: note = source = /note="Description of Artificial Sequence: Synthetic oligonucleotide"
  source 1..20: mol_type = other RNA
gaggctaagcatatctttct

SEQ ID NO: 1365 - RNA, 20 nt, synthetic construct
  misc_feature 1..20: note = source = /note="Description of Artificial Sequence: Synthetic oligonucleotide"
  source 1..20: mol_type = other RNA
agcatatctttctaggaaga

SEQ ID NO: 1366 - RNA, 20 nt, synthetic construct
  misc_feature 1..20: note = source = /note="Description of Artificial Sequence: Synthetic oligonucleotide"
  source 1..20: mol_type = other RNA
tttctaggaagatggcatca

SEQ ID NO: 1367 - RNA, 20 nt, synthetic construct
  misc_feature 1..20: note = source = /note="Description of Artificial Sequence: Synthetic oligonucleotide"
  source 1..20: mol_type = other RNA
ttttattatgcctgtaatcc

SEQ ID NO: 1368 - RNA, 20 nt, synthetic construct
  misc_feature 1..20: note = source = /note="Description of Artificial Sequence: Synthetic oligonucleotide"
  source 1..20: mol_type = other RNA
tgcctgtaatcctggcactt

SEQ ID NO: 1369 - RNA, 20 nt, synthetic construct
  misc_feature 1..20: note = source = /note="Description of Artificial Sequence: Synthetic oligonucleotide"
  source 1..20: mol_type = other RNA
gcctgtaatcctggcacttt

SEQ ID NO: 1370 - RNA, 20 nt, synthetic construct
  misc_feature 1..20: note = source = /note="Description of Artificial Sequence: Synthetic oligonucleotide"
  source 1..20: mol_type = other RNA
tgtaatcctggcactttggg

SEQ ID NO: 1371 - RNA, 20 nt, synthetic construct
  misc_feature 1..20: note = source = /note="Description of Artificial Sequence: Synthetic oligonucleotide"
  source 1..20: mol_type = other RNA
cctggcactttgggaggcca

SEQ ID NO: 1372 - RNA, 20 nt, synthetic construct
  misc_feature 1..20: note = source = /note="Description of Artificial Sequence: Synthetic oligonucleotide"
  source 1..20: mol_type = other RNA
ggcactttgggaggccaagg

SEQ ID NO: 1373 - RNA, 20 nt, synthetic construct
  misc_feature 1..20: note = source = /note="Description of Artificial Sequence: Synthetic oligonucleotide"
  source 1..20: mol_type = other RNA
gcactttgggaggccaaggc

SEQ ID NO: 1374 - RNA, 20 nt, synthetic construct
  misc_feature 1..20: note = source = /note="Description of Artificial Sequence: Synthetic oligonucleotide"
  source 1..20: mol_type = other RNA
ccagaagtttgagattagtc

SEQ ID NO: 1375 - RNA, 20 nt, synthetic construct
  misc_feature 1..20: note = source = /note="Description of Artificial Sequence: Synthetic oligonucleotide"
  source 1..20: mol_type = other RNA
cagaagtttgagattagtct

SEQ ID NO: 1376 - RNA, 20 nt, synthetic construct
  misc_feature 1..20: note = source = /note="Description of Artificial Sequence: Synthetic oligonucleotide"
  source 1..20: mol_type = other RNA
acatcctcttatagatgaga

SEQ ID NO: 1377 - RNA, 20 nt, synthetic construct
  misc_feature 1..20: note = source = /note="Description of Artificial Sequence: Synthetic oligonucleotide"
  source 1..20: mol_type = other RNA
atacttaatcactcaaaagt

SEQ ID NO: 1378 - RNA, 20 nt, synthetic construct
  misc_feature 1..20: note = source = /note="Description of Artificial Sequence: Synthetic oligonucleotide"
  source 1..20: mol_type = other RNA
aatagcctttagagctcata

SEQ ID NO: 1379 - RNA, 20 nt, synthetic construct
  misc_feature 1..20: note = source = /note="Description of Artificial Sequence: Synthetic oligonucleotide"
  source 1..20: mol_type = other RNA
atagcctttagagctcatat

SEQ ID NO: 1380 - RNA, 20 nt, synthetic construct
  misc_feature 1..20: note = source = /note="Description of Artificial Sequence: Synthetic oligonucleotide"
  source 1..20: mol_type = other RNA
aagattcaatagatagtgat

SEQ ID NO: 1381 - RNA, 20 nt, synthetic construct
  misc_feature 1..20: note = source = /note="Description of Artificial Sequence: Synthetic oligonucleotide"
  source 1..20: mol_type = other RNA
tagtgataggttatatgact

SEQ ID NO: 1382 - RNA, 20 nt, synthetic construct
  misc_feature 1..20: note = source = /note="Description of Artificial Sequence: Synthetic oligonucleotide"
  source 1..20: mol_type = other RNA
ggttatatgacttggtaaag

SEQ ID NO: 1383 - RNA, 20 nt, synthetic construct
  misc_feature 1..20: note = source = /note="Description of Artificial Sequence: Synthetic oligonucleotide"
  source 1..20: mol_type = other RNA
gttatatgacttggtaaaga

SEQ ID NO: 1384 - RNA, 20 nt, synthetic construct
  misc_feature 1..20: note = source = /note="Description of Artificial Sequence: Synthetic oligonucleotide"
  source 1..20: mol_type = other RNA
gtaaagagggcttaatgtat

SEQ ID NO: 1385 - RNA, 20 nt, synthetic construct
  misc_feature 1..20: note = source = /note="Description of Artificial Sequence: Synthetic oligonucleotide"
  source 1..20: mol_type = other RNA
gttacctagccattcagttc

SEQ ID NO: 1386 - RNA, 20 nt, synthetic construct
  misc_feature 1..20: note = source = /note="Description of Artificial Sequence: Synthetic oligonucleotide"
  source 1..20: mol_type = other RNA
gatgtaacccaagtgttaaa

SEQ ID NO: 1387 - RNA, 20 nt, synthetic construct
  misc_feature 1..20: note = source = /note="Description of Artificial Sequence: Synthetic oligonucleotide"
  source 1..20: mol_type = other RNA
agtgttaaaaggaatgtgac

SEQ ID NO: 1388 - RNA, 20 nt, synthetic construct
  misc_feature 1..20: note = source = /note="Description of Artificial Sequence: Synthetic oligonucleotide"
  source 1..20: mol_type = other RNA
gtgttaaaaggaatgtgact

SEQ ID NO: 1389 - RNA, 20 nt, synthetic construct
  misc_feature 1..20: note = source = /note="Description of Artificial Sequence: Synthetic oligonucleotide"
  source 1..20: mol_type = other RNA
aaaaggaatgtgactgggtg

SEQ ID NO: 1390 - RNA, 20 nt, synthetic construct
  misc_feature 1..20: note = source = /note="Description of Artificial Sequence: Synthetic oligonucleotide"
  source 1..20: mol_type = other RNA
aggaatgtgactgggtgcgg

SEQ ID NO: 1391 - RNA, 20 nt, synthetic construct
  misc_feature 1..20: note = source = /note="Description of Artificial Sequence: Synthetic oligonucleotide"
  source 1..20: mol_type = other RNA
tgtaatcccagcactttgcg

SEQ ID NO: 1392 - RNA, 20 nt, synthetic construct
  misc_feature 1..20: note = source = /note="Description of Artificial Sequence: Synthetic oligonucleotide"
  source 1..20: mol_type = other RNA
aatcccagcactttgcgagg

SEQ ID NO: 1393 - RNA, 20 nt, synthetic construct
  misc_feature 1..20: note = source = /note="Description of Artificial Sequence: Synthetic oligonucleotide"
  source 1..20: mol_type = other RNA
agcactttgcgaggcggaag

SEQ ID NO: 1394 - RNA, 20 nt, synthetic construct
  misc_feature 1..20: note = source = /note="Description of Artificial Sequence: Synthetic oligonucleotide"
  source 1..20: mol_type = other RNA
gcactttgcgaggcggaagt

SEQ ID NO: 1395 - RNA, 20 nt, synthetic construct
  misc_feature 1..20: note = source = /note="Description of Artificial Sequence: Synthetic oligonucleotide"
  source 1..20: mol_type = other RNA
ctttgcgaggcggaagtggg

SEQ ID NO: 1396 - RNA, 20 nt, synthetic construct
  misc_feature 1..20: note = source = /note="Description of Artificial Sequence: Synthetic oligonucleotide"
  source 1..20: mol_type = other RNA
tttgcgaggcggaagtgggt

SEQ ID NO: 1397 - RNA, 20 nt, synthetic construct
  misc_feature 1..20: note = source = /note="Description of Artificial Sequence: Synthetic oligonucleotide"
  source 1..20: mol_type = other RNA
tgggtgggtctcttgagctc

SEQ ID NO: 1398 - RNA, 20 nt, synthetic construct
  misc_feature 1..20: note = source = /note="Description of Artificial Sequence: Synthetic oligonucleotide"
  source 1..20: mol_type = other RNA
ggtctcttgagctcaggagt

SEQ ID NO: 1399 - RNA, 20 nt, synthetic construct
  misc_feature 1..20: note = source = /note="Description of Artificial Sequence: Synthetic oligonucleotide"
  source 1..20: mol_type = other RNA
tcaggagttggagacaagcc

SEQ ID NO: 1400 - RNA, 20 nt, synthetic construct
  misc_feature 1..20: note = source = /note="Description of Artificial Sequence: Synthetic oligonucleotide"
  source 1..20: mol_type = other RNA
caggagttggagacaagcct

SEQ ID NO: 1401 - RNA, 20 nt, synthetic construct
  misc_feature 1..20: note = source = /note="Description of Artificial Sequence: Synthetic oligonucleotide"
  source 1..20: mol_type = other RNA
ggagacaagcctgggcaaca

SEQ ID NO: 1402 - RNA, 20 nt, synthetic construct
  misc_feature 1..20: note = source = /note="Description of Artificial Sequence: Synthetic oligonucleotide"
  source 1..20: mol_type = other RNA
caaaaaatgcacaaattagc

SEQ ID NO: 1403 - RNA, 20 nt, synthetic construct
  misc_feature 1..20: note = source = /note="Description of Artificial Sequence: Synthetic oligonucleotide"
  source 1..20: mol_type = other RNA
aaaaaatgcacaaattagct

SEQ ID NO: 1404 - RNA, 20 nt, synthetic construct
  misc_feature 1..20: note = source = /note="Description of Artificial Sequence: Synthetic oligonucleotide"
  source 1..20: mol_type = other RNA
atgcacaaattagctgggtg

SEQ ID NO: 1405 - RNA, 20 nt, synthetic construct
  misc_feature 1..20: note = source = /note="Description of Artificial Sequence: Synthetic oligonucleotide"
  source 1..20: mol_type = other RNA
cacaaattagctgggtgtgg

SEQ ID NO: 1406 - RNA, 20 nt, synthetic construct
  misc_feature 1..20: note = source = /note="Description of Artificial Sequence: Synthetic oligonucleotide"
  source 1..20: mol_type = other RNA
tggcacatccctgtagttcc

SEQ ID NO: 1407 - RNA, 20 nt, synthetic construct
  misc_feature 1..20: note = source = /note="Description of Artificial Sequence: Synthetic oligonucleotide"
  source 1..20: mol_type = other RNA
cctgtagttccaggtacttg

SEQ ID NO: 1408 - RNA, 20 nt, synthetic construct
  misc_feature 1..20: note = source = /note="Description of Artificial Sequence: Synthetic oligonucleotide"
  source 1..20: mol_type = other RNA
ctgtagttccaggtacttgt

SEQ ID NO: 1409 - RNA, 20 nt, synthetic construct
  misc_feature 1..20: note = source = /note="Description of Artificial Sequence: Synthetic oligonucleotide"
  source 1..20: mol_type = other RNA
tgtagttccaggtacttgtg

SEQ ID NO: 1410 - RNA, 20 nt, synthetic construct
  misc_feature 1..20: note = source = /note="Description of Artificial Sequence: Synthetic oligonucleotide"
  source 1..20: mol_type = other RNA
tccaggtacttgtggggctg

SEQ ID NO: 1411 - RNA, 20 nt, synthetic construct
  misc_feature 1..20: note = source = /note="Description of Artificial Sequence: Synthetic oligonucleotide"
  source 1..20: mol_type = other RNA
aggtacttgtggggctgagg

SEQ ID NO: 1412 - RNA, 20 nt, synthetic construct
  misc_feature 1..20: note = source = /note="Description of Artificial Sequence: Synthetic oligonucleotide"
  source 1..20: mol_type = other RNA
ggtacttgtggggctgaggc

SEQ ID NO: 1413 - RNA, 20 nt, synthetic construct
  misc_feature 1..20: note = source = /note="Description of Artificial Sequence: Synthetic oligonucleotide"
  source 1..20: mol_type = other RNA
acttgtggggctgaggcggg

SEQ ID NO: 1414 - RNA, 20 nt, synthetic construct
  misc_feature 1..20: note = source = /note="Description of Artificial Sequence: Synthetic oligonucleotide"
  source 1..20: mol_type = other RNA
gtggggctgaggcgggagga

SEQ ID NO: 1415 - RNA, 20 nt, synthetic construct
  misc_feature 1..20: note = source = /note="Description of Artificial Sequence: Synthetic oligonucleotide"
  source 1..20: mol_type = other RNA
gcgggaggatggctcgagcc

SEQ ID NO: 1416 - RNA, 20 nt, synthetic construct
  misc_feature 1..20: note = source = /note="Description of Artificial Sequence: Synthetic oligonucleotide"
  source 1..20: mol_type = other RNA
cgggaggatggctcgagcct

SEQ ID NO: 1417 - RNA, 20 nt, synthetic construct
  misc_feature 1..20: note = source = /note="Description of Artificial Sequence: Synthetic oligonucleotide"
  source 1..20: mol_type = other RNA
ggctcgagcctgggaagttg

SEQ ID NO: 1418 - RNA, 20 nt, synthetic construct
  misc_feature 1..20: note = source = /note="Description of Artificial Sequence: Synthetic oligonucleotide"
  source 1..20: mol_type = other RNA
gaggctgcagtgagccatgt

SEQ ID NO: 1419 - RNA, 20 nt, synthetic construct
  misc_feature 1..20: note = source = /note="Description of Artificial Sequence: Synthetic oligonucleotide"
  source 1..20: mol_type = other RNA
ggtgcccccacacttcagcc

SEQ ID NO: 1420 - RNA, 20 nt, synthetic construct
  misc_feature 1..20: note = source = /note="Description of Artificial Sequence: Synthetic oligonucleotide"
  source 1..20: mol_type = other RNA
gtgcccccacacttcagcct

SEQ ID NO: 1421 - RNA, 20 nt, synthetic construct
  misc_feature 1..20: note = source = /note="Description of Artificial Sequence: Synthetic oligonucleotide"
  source 1..20: mol_type = other RNA
taataacaaattactagatt

SEQ ID NO: 1422 - RNA, 20 nt, synthetic construct
  misc_feature 1..20: note = source = /note="Description of Artificial Sequence: Synthetic oligonucleotide"
  source 1..20: mol_type = other RNA
aataacaaattactagattt

SEQ ID NO: 1423 - RNA, 20 nt, synthetic construct
  misc_feature 1..20: note = source = /note="Description of Artificial Sequence: Synthetic oligonucleotide"
  source 1..20: mol_type = other RNA
ataacaaattactagatttg

SEQ ID NO: 1424 - RNA, 20 nt, synthetic construct
  misc_feature 1..20: note = source = /note="Description of Artificial Sequence: Synthetic oligonucleotide"
  source 1..20: mol_type = other RNA
taacaaattactagatttgg

SEQ ID NO: 1425 - RNA, 20 nt, synthetic construct
  misc_feature 1..20: note = source = /note="Description of Artificial Sequence: Synthetic oligonucleotide"
  source 1..20: mol_type = other RNA
aacaaattactagatttggg

SEQ ID NO: 1426 - RNA, 20 nt, synthetic construct
  misc_feature 1..20: note = source = /note="Description of Artificial Sequence: Synthetic oligonucleotide"
  source 1..20: mol_type = other RNA
cttatctatgtgaaaacaga

SEQ ID NO: 1427 - RNA, 20 nt, synthetic construct
  misc_feature 1..20: note = source = /note="Description of Artificial Sequence: Synthetic oligonucleotide"
  source 1..20: mol_type = other RNA
ttatctatgtgaaaacagaa

SEQ ID NO: 1428 - RNA, 20 nt, synthetic construct
  misc_feature 1..20: note = source = /note="Description of Artificial Sequence: Synthetic oligonucleotide"
  source 1..20: mol_type = other RNA
tgaaaacagaagggcaatgc

SEQ ID NO: 1429 - RNA, 20 nt, synthetic construct
  misc_feature 1..20: note = source = /note="Description of Artificial Sequence: Synthetic oligonucleotide"
  source 1..20: mol_type = other RNA
gaaaacagaagggcaatgca

SEQ ID NO: 1430 - RNA, 20 nt, synthetic construct
  misc_feature 1..20: note = source = /note="Description of Artificial Sequence: Synthetic oligonucleotide"
  source 1..20: mol_type = other RNA
aaaatgacaaagtatctcat

SEQ ID NO: 1431 - RNA, 20 nt, synthetic construct
  misc_feature 1..20: note = source = /note="Description of Artificial Sequence: Synthetic oligonucleotide"
  source 1..20: mol_type = other RNA
aaatgacaaagtatctcata

SEQ ID NO: 1432 - RNA, 20 nt, synthetic construct
  misc_feature 1..20: note = source = /note="Description of Artificial Sequence: Synthetic oligonucleotide"
  source 1..20: mol_type = other RNA
tttcctgttaactgatactg

SEQ ID NO: 1433 - RNA, 20 nt, synthetic construct
  misc_feature 1..20: note = source = /note="Description of Artificial Sequence: Synthetic oligonucleotide"
  source 1..20: mol_type = other RNA
catgttgaagatgtaaaata

SEQ ID NO: 1434 - RNA, 20 nt, synthetic construct
  misc_feature 1..20: note = source = /note="Description of Artificial Sequence: Synthetic oligonucleotide"
  source 1..20: mol_type = other RNA
gatgtaaaataaggttgaaa

SEQ ID NO: 1435 - RNA, 20 nt, synthetic construct
  misc_feature 1..20: note = source = /note="Description of Artificial Sequence: Synthetic oligonucleotide"
  source 1..20: mol_type = other RNA
gcagcagtcttcataatgcc

SEQ ID NO: 1436 - RNA, 20 nt, synthetic construct
  misc_feature 1..20: note = source = /note="Description of Artificial Sequence: Synthetic oligonucleotide"
  source 1..20: mol_type = other RNA
gccaggacaaagtgagaaac

SEQ ID NO: 1437 - RNA, 20 nt, synthetic construct
  misc_feature 1..20: note = source = /note="Description of Artificial Sequence: Synthetic oligonucleotide"
  source 1..20: mol_type = other RNA
ccaggacaaagtgagaaaca

SEQ ID NO: 1438 - RNA, 20 nt, synthetic construct
  misc_feature 1..20: note = source = /note="Description of Artificial Sequence: Synthetic oligonucleotide"
  source 1..20: mol_type = other RNA
aaacagggtcagaatgatga

SEQ ID NO: 1439 - RNA, 20 nt, synthetic construct
  misc_feature 1..20: note = source = /note="Description of Artificial Sequence: Synthetic oligonucleotide"
  source 1..20: mol_type = other RNA
ctctccatctttgctacaca

SEQ ID NO: 1440 - RNA, 20 nt, synthetic construct
  misc_feature 1..20: note = source = /note="Description of Artificial Sequence: Synthetic oligonucleotide"
  source 1..20: mol_type = other RNA
aacttctacaaaccacttac

SEQ ID NO: 1441 - RNA, 20 nt, synthetic construct
  misc_feature 1..20: note = source = /note="Description of Artificial Sequence: Synthetic oligonucleotide"
  source 1..20: mol_type = other RNA
atttttaacactagtcccta

SEQ ID NO: 1442 - RNA, 20 nt, synthetic construct
  misc_feature 1..20: note = source = /note="Description of Artificial Sequence: Synthetic oligonucleotide"
  source 1..20: mol_type = other RNA
ggaactatgacttgtagttt

SEQ ID NO: 1443 - RNA, 20 nt, synthetic construct
  misc_feature 1..20: note = source = /note="Description of Artificial Sequence: Synthetic oligonucleotide"
  source 1..20: mol_type = other RNA
acttgtagttttggacacac

SEQ ID NO: 1444 - RNA, 20 nt, synthetic construct
  misc_feature 1..20: note = source = /note="Description of Artificial Sequence: Synthetic oligonucleotide"
  source 1..20: mol_type = other RNA
cttgtagttttggacacaca

SEQ ID NO: 1445 - RNA, 20 nt, synthetic construct
  misc_feature 1..20: note = source = /note="Description of Artificial Sequence: Synthetic oligonucleotide"
  source 1..20: mol_type = other RNA
gacacacagggtgaattact

SEQ ID NO: 1446 - RNA, 20 nt, synthetic construct
  misc_feature 1..20: note = source = /note="Description of Artificial Sequence: Synthetic oligonucleotide"
  source 1..20: mol_type = other RNA
acacacagggtgaattactt

SEQ ID NO: 1447 - RNA, 20 nt, synthetic construct
  misc_feature 1..20: note = source = /note="Description of Artificial Sequence: Synthetic oligonucleotide"
  source 1..20: mol_type = other RNA
cacacagggtgaattacttg

SEQ ID NO: 1448 - RNA, 20 nt, synthetic construct
  misc_feature 1..20: note = source = /note="Description of Artificial Sequence: Synthetic oligonucleotide"
  source 1..20: mol_type = other RNA
ttttattctcatgagaatgc

SEQ ID NO: 1449 - RNA, 20 nt, synthetic construct
  misc_feature 1..20: note = source = /note="Description of Artificial Sequence: Synthetic oligonucleotide"
  source 1..20: mol_type = other RNA
tttattctcatgagaatgct

SEQ ID NO: 1450 - RNA, 20 nt, synthetic construct
  misc_feature 1..20: note = source = /note="Description of Artificial Sequence: Synthetic oligonucleotide"
  source 1..20: mol_type = other RNA
tgagaatgctgggttgcagc

SEQ ID NO: 1451 - RNA, 20 nt, synthetic construct
  misc_feature 1..20: note = source = /note="Description of Artificial Sequence: Synthetic oligonucleotide"
  source 1..20: mol_type = other RNA
aatgctgggttgcagccggt

SEQ ID NO: 1452 - RNA, 20 nt, synthetic construct
  misc_feature 1..20: note = source = /note="Description of Artificial Sequence: Synthetic oligonucleotide"
  source 1..20: mol_type = other RNA
gccggttggatcccatacct

SEQ ID NO: 1453 - RNA, 20 nt, synthetic construct
  misc_feature 1..20: note = source = /note="Description of Artificial Sequence: Synthetic oligonucleotide"
  source 1..20: mol_type = other RNA
ccggttggatcccatacctt

SEQ ID NO: 1454 - RNA, 20 nt, synthetic construct
  misc_feature 1..20: note = source = /note="Description of Artificial Sequence: Synthetic oligonucleotide"
  source 1..20: mol_type = other RNA
ttgggaccatgactgataac

SEQ ID NO: 1455 - RNA, 20 nt, synthetic construct
  misc_feature 1..20: note = source = /note="Description of Artificial Sequence: Synthetic oligonucleotide"
  source 1..20: mol_type = other RNA
accatgactgataactggag

SEQ ID NO: 1456 - RNA, 20 nt, synthetic construct
  misc_feature 1..20: note = source = /note="Description of Artificial Sequence: Synthetic oligonucleotide"
  source 1..20: mol_type = other RNA
gtggagaaaattcactgatc

SEQ ID NO: 1457 - RNA, 20 nt, synthetic construct
  misc_feature 1..20: note = source = /note="Description of Artificial Sequence: Synthetic oligonucleotide"
  source 1..20: mol_type = other RNA
gaaaattcactgatctggaa

SEQ ID NO: 1458 - RNA, 20 nt, synthetic construct
  misc_feature 1..20: note = source = /note="Description of Artificial Sequence: Synthetic oligonucleotide"
  source 1..20: mol_type = other RNA
atctggaaaggttgagcttt

SEQ ID NO: 1459 - RNA, 20 nt, synthetic construct
  misc_feature 1..20: note = source = /note="Description of Artificial Sequence: Synthetic oligonucleotide"
  source 1..20: mol_type = other RNA
tctggaaaggttgagcttta

SEQ ID NO: 1460 - RNA, 20 nt, synthetic construct
  misc_feature 1..20: note = source = /note="Description of Artificial Sequence: Synthetic oligonucleotide"
  source 1..20: mol_type = other RNA
agggttcagagacttattta

SEQ ID NO: 1461 - RNA, 20 nt, synthetic construct
  misc_feature 1..20: note = source = /note="Description of Artificial Sequence: Synthetic oligonucleotide"
  source 1..20: mol_type = other RNA
acatgtgattgtacccaata

SEQ ID NO: 1462 - RNA, 20 nt, synthetic construct
  misc_feature 1..20: note = source = /note="Description of Artificial Sequence: Synthetic oligonucleotide"
  source 1..20: mol_type = other RNA
tacccaataaggaagtatat

SEQ ID NO: 1463 - RNA, 20 nt, synthetic construct
  misc_feature 1..20: note = source = /note="Description of Artificial Sequence: Synthetic oligonucleotide"
  source 1..20: mol_type = other RNA
tgatcatagcatctacttgt

SEQ ID NO: 1464 - RNA, 20 nt, synthetic construct
  misc_feature 1..20: note = source = /note="Description of Artificial Sequence: Synthetic oligonucleotide"
  source 1..20: mol_type = other RNA
tgttagacccattaagaagt

SEQ ID NO: 1465 - RNA, 20 nt, synthetic construct
  misc_feature 1..20: note = source = /note="Description of Artificial Sequence: Synthetic oligonucleotide"
  source 1..20: mol_type = other RNA
ttaagaagttggtgtagtga

SEQ ID NO: 1466 - RNA, 20 nt, synthetic construct
  misc_feature 1..20: note = source = /note="Description of Artificial Sequence: Synthetic oligonucleotide"
  source 1..20: mol_type = other RNA
agttggtgtagtgatggtta

SEQ ID NO: 1467 - RNA, 20 nt, synthetic construct
  misc_feature 1..20: note = source = /note="Description of Artificial Sequence: Synthetic oligonucleotide"
  source 1..20: mol_type = other RNA
aaagcagtaagatagaattt

SEQ ID NO: 1468 - RNA, 20 nt, synthetic construct
  misc_feature 1..20: note = source = /note="Description of Artificial Sequence: Synthetic oligonucleotide"
  source 1..20: mol_type = other RNA
ttaggttctgttctccttac

SEQ ID NO: 1469 - RNA, 20 nt, synthetic construct
  misc_feature 1..20: note = source = /note="Description of Artificial Sequence: Synthetic oligonucleotide"
  source 1..20: mol_type = other RNA
taaatctgttctcgcatatt

SEQ ID NO: 1470 - RNA, 20 nt, synthetic construct
  misc_feature 1..20: note = source = /note="Description of Artificial Sequence: Synthetic oligonucleotide"
  source 1..20: mol_type = other RNA
ttataagtaatttatacaga

SEQ ID NO: 1471 - RNA, 20 nt, synthetic construct
  misc_feature 1..20: note = source = /note="Description of Artificial Sequence: Synthetic oligonucleotide"
  source 1..20: mol_type = other RNA
catattcaaaagaagaaaaa

SEQ ID NO: 1472 - RNA, 20 nt, synthetic construct
  misc_feature 1..20: note = source = /note="Description of Artificial Sequence: Synthetic oligonucleotide"
  source 1..20: mol_type = other RNA
atattcaaaagaagaaaaat

SEQ ID NO: 1473 - RNA, 20 nt, synthetic construct
  misc_feature 1..20: note = source = /note="Description of Artificial Sequence: Synthetic oligonucleotide"
  source 1..20: mol_type = other RNA
tgatgtactactctcttcaa

SEQ ID NO: 1474 - RNA, 20 nt, synthetic construct
  misc_feature 1..20: note = source = /note="Description of Artificial Sequence: Synthetic oligonucleotide"
  source 1..20: mol_type = other RNA
gatgtactactctcttcaaa

SEQ ID NO: 1475 - RNA, 20 nt, synthetic construct
  misc_feature 1..20: note = source = /note="Description of Artificial Sequence: Synthetic oligonucleotide"
  source 1..20: mol_type = other RNA
aaagggaattgcctatgttc

SEQ ID NO: 1476 - RNA, 20 nt, synthetic construct
  misc_feature 1..20: note = source = /note="Description of Artificial Sequence: Synthetic oligonucleotide"
  source 1..20: mol_type = other RNA
atgttcaggcatagaaatgc

SEQ ID NO: 1477 - RNA, 20 nt, synthetic construct
  misc_feature 1..20: note = source = /note="Description of Artificial Sequence: Synthetic oligonucleotide"
  source 1..20: mol_type = other RNA
atgcaggcagtctgacattt

SEQ ID NO: 1478 - RNA, 20 nt, synthetic construct
  misc_feature 1..20: note = source = /note="Description of Artificial Sequence: Synthetic oligonucleotide"
  source 1..20: mol_type = other RNA
atttgtcacagtttgttctg

SEQ ID NO: 1479 - RNA, 20 nt, synthetic construct
  misc_feature 1..20: note = source = /note="Description of Artificial Sequence: Synthetic oligonucleotide"
  source 1..20: mol_type = other RNA
tttgtcacagtttgttctgt

SEQ ID NO: 1480 - RNA, 20 nt, synthetic construct
  misc_feature 1..20: note = source = /note="Description of Artificial Sequence: Synthetic oligonucleotide"
  source 1..20: mol_type = other RNA
gtcacagtttgttctgtggg

SEQ ID NO: 1481 - RNA, 20 nt, synthetic construct
  misc_feature 1..20: note = source = /note="Description of Artificial Sequence: Synthetic oligonucleotide"
  source 1..20: mol_type = other RNA
tcacagtttgttctgtgggt

SEQ ID NO: 1482 - RNA, 20 nt, synthetic construct
  misc_feature 1..20: note = source = /note="Description of Artificial Sequence: Synthetic oligonucleotide"
  source 1..20: mol_type = other RNA
ctgtgggtgggtaaaagtaa

SEQ ID NO: 1483 - RNA, 20 nt, synthetic construct
  misc_feature 1..20: note = source = /note="Description of Artificial Sequence: Synthetic oligonucleotide"
  source 1..20: mol_type = other RNA
taaatctagcttctatgtcc

SEQ ID NO: 1484 - RNA, 20 nt, synthetic construct
  misc_feature 1..20: note = source = /note="Description of Artificial Sequence: Synthetic oligonucleotide"
  source 1..20: mol_type = other RNA
acattcacccatctctcaaa

SEQ ID NO: 1485 - RNA, 20 nt, synthetic construct
  misc_feature 1..20: note = source = /note="Description of Artificial Sequence: Synthetic oligonucleotide"
  source 1..20: mol_type = other RNA
cattcacccatctctcaaat

SEQ ID NO: 1486 - RNA, 20 nt, synthetic construct
  misc_feature 1..20: note = source = /note="Description of Artificial Sequence: Synthetic oligonucleotide"
  source 1..20: mol_type = other RNA
aaaagtaaaaaagcttcaat

SEQ ID NO: 1487 - RNA, 20 nt, synthetic construct
  misc_feature 1..20: note = source = /note="Description of Artificial Sequence: Synthetic oligonucleotide"
  source 1..20: mol_type = other RNA
aaagtaaaaaagcttcaata

SEQ ID NO: 1488 - RNA, 20 nt, synthetic construct
  misc_feature 1..20: note = source = /note="Description of Artificial Sequence: Synthetic oligonucleotide"
  source 1..20: mol_type = other RNA
gaaagccagataacatagca

SEQ ID NO: 1489 - RNA, 20 nt, synthetic construct
  misc_feature 1..20: note = source = /note="Description of Artificial Sequence: Synthetic oligonucleotide"
  source 1..20: mol_type = other RNA
cttacctgtctgcactaaga

SEQ ID NO: 1490 - RNA, 20 nt, synthetic construct
  misc_feature 1..20: note = source = /note="Description of Artificial Sequence: Synthetic oligonucleotide"
  source 1..20: mol_type = other RNA
ttacctgtctgcactaagaa

SEQ ID NO: 1491 - RNA, 20 nt, synthetic construct
  misc_feature 1..20: note = source = /note="Description of Artificial Sequence: Synthetic oligonucleotide"
  source 1..20: mol_type = other RNA
ctatccataacatactgtcc

SEQ ID NO: 1492 - RNA, 20 nt, synthetic construct
  misc_feature 1..20: note = source = /note="Description of Artificial Sequence: Synthetic oligonucleotide"
  source 1..20: mol_type = other RNA
agaatttttatatttgccat

SEQ ID NO: 1493 - RNA, 20 nt, synthetic construct
  misc_feature 1..20: note = source = /note="Description of Artificial Sequence: Synthetic oligonucleotide"
  source 1..20: mol_type = other RNA
ttcattatatttgcattaaa

SEQ ID NO: 1494 - RNA, 20 nt, synthetic construct
  misc_feature 1..20: note = source = /note="Description of Artificial Sequence: Synthetic oligonucleotide"
  source 1..20: mol_type = other RNA
gaaaagaagaataccataaa

SEQ ID NO: 1495 - RNA, 20 nt, synthetic construct
  misc_feature 1..20: note = source = /note="Description of Artificial Sequence: Synthetic oligonucleotide"
  source 1..20: mol_type = other RNA
aaaagaagaataccataaat

SEQ ID NO: 1496 - RNA, 20 nt, synthetic construct
  misc_feature 1..20: note = source = /note="Description of Artificial Sequence: Synthetic oligonucleotide"
  source 1..20: mol_type = other RNA
tgggtacctttcaaaaatga

SEQ ID NO: 1497 - RNA, 20 nt, synthetic construct
  misc_feature 1..20: note = source = /note="Description of Artificial Sequence: Synthetic oligonucleotide"
  source 1..20: mol_type = other RNA
acaaacagatacattttagc

SEQ ID NO: 1498 - RNA, 20 nt, synthetic construct
  misc_feature 1..20: note = source = /note="Description of Artificial Sequence: Synthetic oligonucleotide"
  source 1..20: mol_type = other RNA
ttccaatctagccactgaaa

SEQ ID NO: 1499 - RNA, 20 nt, synthetic construct
  misc_feature 1..20: note = source = /note="Description of Artificial Sequence: Synthetic oligonucleotide"
  source 1..20: mol_type = other RNA
cataagttgaatttaaaaca

SEQ ID NO: 1500 - RNA, 20 nt, synthetic construct
  misc_feature 1..20: note = source = /note="Description of Artificial Sequence: Synthetic oligonucleotide"
  source 1..20: mol_type = other RNA
tgtctgccacattacgcttg

SEQ ID NO: 1501 - RNA, 20 nt, synthetic construct
  misc_feature 1..20: note = source = /note="Description of Artificial Sequence: Synthetic oligonucleotide"
  source 1..20: mol_type = other RNA
ttacgcttgtggaaaaacac

SEQ ID NO: 1502 - RNA, 20 nt, synthetic construct
  misc_feature 1..20: note = source = /note="Description of Artificial Sequence: Synthetic oligonucleotide"
  source 1..20: mol_type = other RNA
gctaatagacattttgctgt

SEQ ID NO: 1503 - RNA, 20 nt, synthetic construct
  misc_feature 1..20: note = source = /note="Description of Artificial Sequence: Synthetic oligonucleotide"
  source 1..20: mol_type = other RNA
ctgttggctcaccttattaa

SEQ ID NO: 1504 - RNA, 20 nt, synthetic construct
  misc_feature 1..20: note = source = /note="Description of Artificial Sequence: Synthetic oligonucleotide"
  source 1..20: mol_type = other RNA
gcaaacttgaaaaagacgtt

SEQ ID NO: 1505 - RNA, 20 nt, synthetic construct
  misc_feature 1..20: note = source = /note="Description of Artificial Sequence: Synthetic oligonucleotide"
  source 1..20: mol_type = other RNA
agacgtttggttactaactg

SEQ ID NO: 1506 - RNA, 20 nt, synthetic construct
  misc_feature 1..20: note = source = /note="Description of Artificial Sequence: Synthetic oligonucleotide"
  source 1..20: mol_type = other RNA
gacgtttggttactaactgt

SEQ ID NO: 1507 - RNA, 20 nt, synthetic construct
  misc_feature 1..20: note = source = /note="Description of Artificial Sequence: Synthetic oligonucleotide"
  source 1..20: mol_type = other RNA
tatttttattttttattttt

SEQ ID NO: 1508 - RNA, 20 nt, synthetic construct
  misc_feature 1..20: note = source = /note="Description of Artificial Sequence: Synthetic oligonucleotide"
  source 1..20: mol_type = other RNA
agagtctcactctcttgccc

SEQ ID NO: 1509 - RNA, 20 nt, synthetic construct
  misc_feature 1..20: note = source = /note="Description of Artificial Sequence: Synthetic oligonucleotide"
  source 1..20: mol_type = other RNA
tctcactctcttgcccaggc

SEQ ID NO: 1510 - RNA, 20 nt, synthetic construct
  misc_feature 1..20: note = source = /note="Description of Artificial Sequence: Synthetic oligonucleotide"
  source 1..20: mol_type = other RNA
ttgcccaggctggagtgcag

SEQ ID NO: 1511 - RNA, 20 nt, synthetic construct
  misc_feature 1..20: note = source = /note="Description of Artificial Sequence: Synthetic oligonucleotide"
  source 1..20: mol_type = other RNA
ggagtgcagtggcatgatct

SEQ ID NO: 1512 - RNA, 20 nt, synthetic construct
  misc_feature 1..20: note = source = /note="Description of Artificial Sequence: Synthetic oligonucleotide"
  source 1..20: mol_type = other RNA
tcactgcagcctcctccttc

SEQ ID NO: 1513 - RNA, 20 nt, synthetic construct
  misc_feature 1..20: note = source = /note="Description of Artificial Sequence: Synthetic oligonucleotide"
  source 1..20: mol_type = other RNA
cactgcagcctcctccttct

SEQ ID NO: 1514 - RNA, 20 nt, synthetic construct
  misc_feature 1..20: note = source = /note="Description of Artificial Sequence: Synthetic oligonucleotide"
  source 1..20: mol_type = other RNA
gtctcagcctcccgagtagc

SEQ ID NO: 1515 - RNA, 20 nt, synthetic construct
  misc_feature 1..20: note = source = /note="Description of Artificial Sequence: Synthetic oligonucleotide"
  source 1..20: mol_type = other RNA
tctcagcctcccgagtagct

SEQ ID NO: 1516 - RNA, 20 nt, synthetic construct
  misc_feature 1..20: note = source = /note="Description of Artificial Sequence: Synthetic oligonucleotide"
  source 1..20: mol_type = other RNA
tcccgagtagctgggattat

SEQ ID NO: 1517 - RNA, 20 nt, synthetic construct
  misc_feature 1..20: note = source = /note="Description of Artificial Sequence: Synthetic oligonucleotide"
  source 1..20: mol_type = other RNA
taggcaccagccaccatgcc

SEQ ID NO: 1518 - RNA, 20 nt, synthetic construct
  misc_feature 1..20: note = source = /note="Description of Artificial Sequence: Synthetic oligonucleotide"
  source 1..20: mol_type = other RNA
gaaacagcgtttcgccatgt

SEQ ID NO: 1519 - RNA, 20 nt, synthetic construct
  misc_feature 1..20: note = source = /note="Description of Artificial Sequence: Synthetic oligonucleotide"
  source 1..20: mol_type = other RNA
agcgtttcgccatgtaggct

SEQ ID NO: 1520 - RNA, 20 nt, synthetic construct
  misc_feature 1..20: note = source = /note="Description of Artificial Sequence: Synthetic oligonucleotide"
  source 1..20: mol_type = other RNA
tttcgccatgtaggctaggc

SEQ ID NO: 1521 - RNA, 20 nt, synthetic construct
  misc_feature 1..20: note = source = /note="Description of Artificial Sequence: Synthetic oligonucleotide"
  source 1..20: mol_type = other RNA
ccttctgcttcctaaagtgc

SEQ ID NO: 1522 - RNA, 20 nt, synthetic construct
  misc_feature 1..20: note = source = /note="Description of Artificial Sequence: Synthetic oligonucleotide"
  source 1..20: mol_type = other RNA
cttctgcttcctaaagtgct

SEQ ID NO: 1523 - RNA, 20 nt, synthetic construct
  misc_feature 1..20: note = source = /note="Description of Artificial Sequence: Synthetic oligonucleotide"
  source 1..20: mol_type = other RNA
tcctaaagtgctgggattac

SEQ ID NO: 1524 - RNA, 20 nt, synthetic construct
  misc_feature 1..20: note = source = /note="Description of Artificial Sequence: Synthetic oligonucleotide"
  source 1..20: mol_type = other RNA
ggattacaggcatgagccat

SEQ ID NO: 1525 - RNA, 20 nt, synthetic construct
  misc_feature 1..20: note = source = /note="Description of Artificial Sequence: Synthetic oligonucleotide"
  source 1..20: mol_type = other RNA
acaggcatgagccatcggcc

SEQ ID NO: 1526 - RNA, 20 nt, synthetic construct
  misc_feature 1..20: note = source = /note="Description of Artificial Sequence: Synthetic oligonucleotide"
  source 1..20: mol_type = other RNA
ttatttactgttaaaaaatg

SEQ ID NO: 1527 - RNA, 20 nt, synthetic construct
  misc_feature 1..20: note = source = /note="Description of Artificial Sequence: Synthetic oligonucleotide"
  source 1..20: mol_type = other RNA
ttatttcaaataagatttta

SEQ ID NO: 1528 - RNA, 20 nt, synthetic construct
  misc_feature 1..20: note = source = /note="Description of Artificial Sequence: Synthetic oligonucleotide"
  source 1..20: mol_type = other RNA
accaacatttttcaagagca

SEQ ID NO: 1529 - RNA, 20 nt, synthetic construct
  misc_feature 1..20: note = source = /note="Description of Artificial Sequence: Synthetic oligonucleotide"
  source 1..20: mol_type = other RNA
ccaacatttttcaagagcat

SEQ ID NO: 1530 - RNA, 20 nt, synthetic construct
  misc_feature 1..20: note = source = /note="Description of Artificial Sequence: Synthetic oligonucleotide"
  source 1..20: mol_type = other RNA
ttcaagagcatgggaaatct

SEQ ID NO: 1531 - RNA, 20 nt, synthetic construct
  misc_feature 1..20: note = source = /note="Description of Artificial Sequence: Synthetic oligonucleotide"
  source 1..20: mol_type = other RNA
tcaagagcatgggaaatcta

SEQ ID NO: 1532 - RNA, 20 nt, synthetic construct
  misc_feature 1..20: note = source = /note="Description of Artificial Sequence: Synthetic oligonucleotide"
  source 1..20: mol_type = other RNA
agcatgggaaatctagggta

SEQ ID NO: 1533 - RNA, 20 nt, synthetic construct
  misc_feature 1..20: note = source = /note="Description of Artificial Sequence: Synthetic oligonucleotide"
  source 1..20: mol_type = other RNA
gtgactttaaagacacttct

SEQ ID NO: 1534 - RNA, 20 nt, synthetic construct
  misc_feature 1..20: note = source = /note="Description of Artificial Sequence: Synthetic oligonucleotide"
  source 1..20: mol_type = other RNA
tgactttaaagacacttctt

SEQ ID NO: 1535 - RNA, 20 nt, synthetic construct
  misc_feature 1..20: note = source = /note="Description of Artificial Sequence: Synthetic oligonucleotide"
  source 1..20: mol_type = other RNA
attagtcatgccttaatcct

SEQ ID NO: 1536 - RNA, 20 nt, synthetic construct
  misc_feature 1..20: note = source = /note="Description of Artificial Sequence: Synthetic oligonucleotide"
  source 1..20: mol_type = other RNA
ttagtcatgccttaatcctc

SEQ ID NO: 1537 - RNA, 20 nt, synthetic construct
  misc_feature 1..20: note = source = /note="Description of Artificial Sequence: Synthetic oligonucleotide"
  source 1..20: mol_type = other RNA
tagtcatgccttaatcctcg

SEQ ID NO: 1538 - RNA, 20 nt, synthetic construct
  misc_feature 1..20: note = source = /note="Description of Artificial Sequence: Synthetic oligonucleotide"
  source 1..20: mol_type = other RNA
gccttaatcctcggggtttt

SEQ ID NO: 1539 - RNA, 20 nt, synthetic construct
  misc_feature 1..20: note = source = /note="Description of Artificial Sequence: Synthetic oligonucleotide"
  source 1..20: mol_type = other RNA
ccttaatcctcggggttttt

SEQ ID NO: 1540 - RNA, 20 nt, synthetic construct
  misc_feature 1..20: note = source = /note="Description of Artificial Sequence: Synthetic oligonucleotide"
  source 1..20: mol_type = other RNA
gtttttgggaaactatattt

SEQ ID NO: 1541 - RNA, 20 nt, synthetic construct
  misc_feature 1..20: note = source = /note="Description of Artificial Sequence: Synthetic oligonucleotide"
  source 1..20: mol_type = other RNA
tttttgggaaactatattta

SEQ ID NO: 1542 - RNA, 20 nt, synthetic construct
  misc_feature 1..20: note = source = /note="Description of Artificial Sequence: Synthetic oligonucleotide"
  source 1..20: mol_type = other RNA
ttttgggaaactatatttag

SEQ ID NO: 1543 - RNA, 20 nt, synthetic construct
  misc_feature 1..20: note = source = /note="Description of Artificial Sequence: Synthetic oligonucleotide"
  source 1..20: mol_type = other RNA
attgtaatttttctcagtat

SEQ ID NO: 1544 - RNA, 20 nt, synthetic construct
  misc_feature 1..20: note = source = /note="Description of Artificial Sequence: Synthetic oligonucleotide"
  source 1..20: mol_type = other RNA
ctcagtattggtaagaattc

SEQ ID NO: 1545 - RNA, 20 nt, synthetic construct
  misc_feature 1..20: note = source = /note="Description of Artificial Sequence: Synthetic oligonucleotide"
  source 1..20: mol_type = other RNA
ggtaagaattcaggtgttta

SEQ ID NO: 1546 - RNA, 20 nt, synthetic construct
  misc_feature 1..20: note = source = /note="Description of Artificial Sequence: Synthetic oligonucleotide"
  source 1..20: mol_type = other RNA
gaattcaggtgtttaaggaa

SEQ ID NO: 1547 - RNA, 20 nt, synthetic construct
  misc_feature 1..20: note = source = /note="Description of Artificial Sequence: Synthetic oligonucleotide"
  source 1..20: mol_type = other RNA
gatataatgaatgtagatga

SEQ ID NO: 1548 - RNA, 20 nt, synthetic construct
  misc_feature 1..20: note = source = /note="Description of Artificial Sequence: Synthetic oligonucleotide"
  source 1..20: mol_type = other RNA
atgaaggtgaaatccgagat

SEQ ID NO: 1549 - RNA, 20 nt, synthetic construct
  misc_feature 1..20: note = source = /note="Description of Artificial Sequence: Synthetic oligonucleotide"
  source 1..20: mol_type = other RNA
gaaatccgagataggaagag

SEQ ID NO: 1550 - RNA, 20 nt, synthetic construct
  misc_feature 1..20: note = source = /note="Description of Artificial Sequence: Synthetic oligonucleotide"
  source 1..20: mol_type = other RNA
acttttttttccttcaccca

SEQ ID NO: 1551 - RNA, 20 nt, synthetic construct
  misc_feature 1..20: note = source = /note="Description of Artificial Sequence: Synthetic oligonucleotide"
  source 1..20: mol_type = other RNA
gaaagccattgaatactgaa

SEQ ID NO: 1552 - RNA, 20 nt, synthetic construct
  misc_feature 1..20: note = source = /note="Description of Artificial Sequence: Synthetic oligonucleotide"
  source 1..20: mol_type = other RNA
aaagccattgaatactgaat

SEQ ID NO: 1553 - RNA, 20 nt, synthetic construct
  misc_feature 1..20: note = source = /note="Description of Artificial Sequence: Synthetic oligonucleotide"
  source 1..20: mol_type = other RNA
gggtcatgttgtaatttaat

SEQ ID NO: 1554 - RNA, 20 nt, synthetic construct
  misc_feature 1..20: note = source = /note="Description of Artificial Sequence: Synthetic oligonucleotide"
  source 1..20: mol_type = other RNA
ggtcatgttgtaatttaatt

SEQ ID NO: 1555 - RNA, 20 nt, synthetic construct
  misc_feature 1..20: note = source = /note="Description of Artificial Sequence: Synthetic oligonucleotide"
  source 1..20: mol_type = other RNA
gcctacttagtgtatatctc

SEQ ID NO: 1556 - RNA, 20 nt, synthetic construct
  misc_feature 1..20: note = source = /note="Description of Artificial Sequence: Synthetic oligonucleotide"
  source 1..20: mol_type = other RNA
actgaagtaaataagcaagc

SEQ ID NO: 1557 - RNA, 20 nt, synthetic construct
  misc_feature 1..20: note = source = /note="Description of Artificial Sequence: Synthetic oligonucleotide"
  source 1..20: mol_type = other RNA
ggaataagtcctgcaaatag

SEQ ID NO: 1558 - RNA, 20 nt, synthetic construct
  misc_feature 1..20: note = source = /note="Description of Artificial Sequence: Synthetic oligonucleotide"
  source 1..20: mol_type = other RNA
aactgatcctaaattgaatt

SEQ ID NO: 1559 - RNA, 20 nt, synthetic construct
  misc_feature 1..20: note = source = /note="Description of Artificial Sequence: Synthetic oligonucleotide"
  source 1..20: mol_type = other RNA
tagattacaagaaatgcaac

SEQ ID NO: 1560 - RNA, 20 nt, synthetic construct
  misc_feature 1..20: note = source = /note="Description of Artificial Sequence: Synthetic oligonucleotide"
  source 1..20: mol_type = other RNA
ttacagttcttcctcttttt

SEQ ID NO: 1561 - RNA, 20 nt, synthetic construct
  misc_feature 1..20: note = source = /note="Description of Artificial Sequence: Synthetic oligonucleotide"
  source 1..20: mol_type = other RNA
acatctgtatgctcattttt

SEQ ID NO: 1562 - RNA, 20 nt, synthetic construct
  misc_feature 1..20: note = source = /note="Description of Artificial Sequence: Synthetic oligonucleotide"
  source 1..20: mol_type = other RNA
catctgtatgctcattttta

SEQ ID NO: 1563 - RNA, 20 nt, synthetic construct
  misc_feature 1..20: note = source = /note="Description of Artificial Sequence: Synthetic oligonucleotide"
  source 1..20: mol_type = other RNA
ttttagggccaaaaaatagt

SEQ ID NO: 1564 - RNA, 20 nt, synthetic construct
  misc_feature 1..20: note = source = /note="Description of Artificial Sequence: Synthetic oligonucleotide"
  source 1..20: mol_type = other RNA
aaaaatagtaggcttctctt

SEQ ID NO: 1565 - RNA, 20 nt, synthetic construct
  misc_feature 1..20: note = source = /note="Description of Artificial Sequence: Synthetic oligonucleotide"
  source 1..20: mol_type = other RNA
tctctccttccagttacacg

SEQ ID NO: 1566 - RNA, 20 nt, synthetic construct
  misc_feature 1..20: note = source = /note="Description of Artificial Sequence: Synthetic oligonucleotide"
  source 1..20: mol_type = other RNA
tcacatcaacatttgacacg

SEQ ID NO: 1567 - RNA, 20 nt, synthetic construct
  misc_feature 1..20: note = source = /note="Description of Artificial Sequence: Synthetic oligonucleotide"
  source 1..20: mol_type = other RNA
cacatcaacatttgacacgt

SEQ ID NO: 1568 - RNA, 20 nt, synthetic construct
  misc_feature 1..20: note = source = /note="Description of Artificial Sequence: Synthetic oligonucleotide"
  source 1..20: mol_type = other RNA
acacgtgggtaccgtgcacg

SEQ ID NO: 1569 - RNA, 20 nt, synthetic construct
  misc_feature 1..20: note = source = /note="Description of Artificial Sequence: Synthetic oligonucleotide"
  source 1..20: mol_type = other RNA
gtatttacaaacaccatcct

SEQ ID NO: 1570 - RNA, 20 nt, synthetic construct
  misc_feature 1..20: note = source = /note="Description of Artificial Sequence: Synthetic oligonucleotide"
  source 1..20: mol_type = other RNA
cagagactcttatgtaacag

SEQ ID NO: 1571 - RNA, 20 nt, synthetic construct
  misc_feature 1..20: note = source = /note="Description of Artificial Sequence: Synthetic oligonucleotide"
  source 1..20: mol_type = other RNA
gagtaagctttgagtgtctg

SEQ ID NO: 1572 - RNA, 20 nt, synthetic construct
  misc_feature 1..20: note = source = /note="Description of Artificial Sequence: Synthetic oligonucleotide"
  source 1..20: mol_type = other RNA
agtaagctttgagtgtctgt

SEQ ID NO: 1573 - RNA, 20 nt, synthetic construct
  misc_feature 1..20: note = source = /note="Description of Artificial Sequence: Synthetic oligonucleotide"
  source 1..20: mol_type = other RNA
aagctttgagtgtctgtggg

SEQ ID NO: 1574 - RNA, 20 nt, synthetic construct
  misc_feature 1..20: note = source = /note="Description of Artificial Sequence: Synthetic oligonucleotide"
  source 1..20: mol_type = other RNA
ctttgagtgtctgtgggcgg

SEQ ID NO: 1575 - RNA, 20 nt, synthetic construct
  misc_feature 1..20: note = source = /note="Description of Artificial Sequence: Synthetic oligonucleotide"
  source 1..20: mol_type = other RNA
acacagtttaattcattgtc

SEQ ID NO: 1576 - RNA, 20 nt, synthetic construct
  misc_feature 1..20: note = source = /note="Description of Artificial Sequence: Synthetic oligonucleotide"
  source 1..20: mol_type = other RNA
cacagtttaattcattgtcc

SEQ ID NO: 1577 - RNA, 20 nt, synthetic construct
  misc_feature 1..20: note = source = /note="Description of Artificial Sequence: Synthetic oligonucleotide"
  source 1..20: mol_type = other RNA
attgtccgggagcccttgtc

SEQ ID NO: 1578 - RNA, 20 nt, synthetic construct
  misc_feature 1..20: note = source = /note="Description of Artificial Sequence: Synthetic oligonucleotide"
  source 1..20: mol_type = other RNA
agcccttgtctggctctgat

SEQ ID NO: 1579 - RNA, 20 nt, synthetic construct
  misc_feature 1..20: note = source = /note="Description of Artificial Sequence: Synthetic oligonucleotide"
  source 1..20: mol_type = other RNA
gcccttgtctggctctgata

SEQ ID NO: 1580 - RNA, 20 nt, synthetic construct
  misc_feature 1..20: note = source = /note="Description of Artificial Sequence: Synthetic oligonucleotide"
  source 1..20: mol_type = other RNA
gggtcatgaaccaaagatca

SEQ ID NO: 1581 - RNA, 20 nt, synthetic construct
  misc_feature 1..20: note = source = /note="Description of Artificial Sequence: Synthetic oligonucleotide"
  source 1..20: mol_type = other RNA
aaccaaagatcaaggtgttt

SEQ ID NO: 1582 - RNA, 20 nt, synthetic construct
  misc_feature 1..20: note = source = /note="Description of Artificial Sequence: Synthetic oligonucleotide"
  source 1..20: mol_type = other RNA
aagatcaaggtgtttaggtc

SEQ ID NO: 1583 - RNA, 20 nt, synthetic construct
  misc_feature 1..20: note = source = /note="Description of Artificial Sequence: Synthetic oligonucleotide"
  source 1..20: mol_type = other RNA
tcaggatattccctaacgca

SEQ ID NO: 1584 - RNA, 20 nt, synthetic construct
  misc_feature 1..20: note = source = /note="Description of Artificial Sequence: Synthetic oligonucleotide"
  source 1..20: mol_type = other RNA
ttttttttttttttttgaga

SEQ ID NO: 1585 - RNA, 20 nt, synthetic construct
  misc_feature 1..20: note = source = /note="Description of Artificial Sequence: Synthetic oligonucleotide"
  source 1..20: mol_type = other RNA
gagtttcgctcttgctgcca

SEQ ID NO: 1586 - RNA, 20 nt, synthetic construct
  misc_feature 1..20: note = source = /note="Description of Artificial Sequence: Synthetic oligonucleotide"
  source 1..20: mol_type = other RNA
ttcgctcttgctgccaaggt

SEQ ID NO: 1587 - RNA, 20 nt, synthetic construct
  misc_feature 1..20: note = source = /note="Description of Artificial Sequence: Synthetic oligonucleotide"
  source 1..20: mol_type = other RNA
ctgccaaggttggagtgcag

SEQ ID NO: 1588 - RNA, 20 nt, synthetic construct
  misc_feature 1..20: note = source = /note="Description of Artificial Sequence: Synthetic oligonucleotide"
  source 1..20: mol_type = other RNA
gtgcagtggcgccgcgatct

SEQ ID NO: 1589 - RNA, 20 nt, synthetic construct
  misc_feature 1..20: note = source = /note="Description of Artificial Sequence: Synthetic oligonucleotide"
  source 1..20: mol_type = other RNA
cactgcaacctccgcctcac

SEQ ID NO: 1590 - RNA, 20 nt, synthetic construct
  misc_feature 1..20: note = source = /note="Description of Artificial Sequence: Synthetic oligonucleotide"
  source 1..20: mol_type = other RNA
gcctcagacacccaagtagc

SEQ ID NO: 1591 - RNA, 20 nt, synthetic construct
  misc_feature 1..20: note = source = /note="Description of Artificial Sequence: Synthetic oligonucleotide"
  source 1..20: mol_type = other RNA
cctcagacacccaagtagct

SEQ ID NO: 1592 - RNA, 20 nt, synthetic construct
  misc_feature 1..20: note = source = /note="Description of Artificial Sequence: Synthetic oligonucleotide"
  source 1..20: mol_type = other RNA
acccaagtagctgggattat

SEQ ID NO: 1593 - RNA, 20 nt, synthetic construct
  misc_feature 1..20: note = source = /note="Description of Artificial Sequence: Synthetic oligonucleotide"
  source 1..20: mol_type = other RNA
taggcatgcgccaccacgcc

SEQ ID NO: 1594 - RNA, 20 nt, synthetic construct
  misc_feature 1..20: note = source = /note="Description of Artificial Sequence: Synthetic oligonucleotide"
  source 1..20: mol_type = other RNA
ttttgtatttttagtacaga

SEQ ID NO: 1595 - RNA, 20 nt, synthetic construct
  misc_feature 1..20: note = source = /note="Description of Artificial Sequence: Synthetic oligonucleotide"
  source 1..20: mol_type = other RNA
tttgtatttttagtacagac

SEQ ID NO: 1596 - RNA, 20 nt, synthetic construct
  misc_feature 1..20: note = source = /note="Description of Artificial Sequence: Synthetic oligonucleotide"
  source 1..20: mol_type = other RNA
ttgtatttttagtacagacg

SEQ ID NO: 1597 - RNA, 20 nt, synthetic construct
  misc_feature 1..20: note = source = /note="Description of Artificial Sequence: Synthetic oligonucleotide"
  source 1..20: mol_type = other RNA
cagacggggtttctccatgt

SEQ ID NO: 1598 - RNA, 20 nt, synthetic construct
  misc_feature 1..20: note = source = /note="Description of Artificial Sequence: Synthetic oligonucleotide"
  source 1..20: mol_type = other RNA
tttctccatgttggtcagcc

SEQ ID NO: 1599 - RNA, 20 nt, synthetic construct
  misc_feature 1..20: note = source = /note="Description of Artificial Sequence: Synthetic oligonucleotide"
  source 1..20: mol_type = other RNA
ggtgttgaactcccgactta

SEQ ID NO: 1600 - RNA, 20 nt, synthetic construct
  misc_feature 1..20: note = source = /note="Description of Artificial Sequence: Synthetic oligonucleotide"
  source 1..20: mol_type = other RNA
ttaaggtgatccgcttgctt

SEQ ID NO: 1601 - RNA, 20 nt, synthetic construct
  misc_feature 1..20: note = source = /note="Description of Artificial Sequence: Synthetic oligonucleotide"
  source 1..20: mol_type = other RNA
gcttcggccccccaaagtgc

SEQ ID NO: 1602 - RNA, 20 nt, synthetic construct
  misc_feature 1..20: note = source = /note="Description of Artificial Sequence: Synthetic oligonucleotide"
  source 1..20: mol_type = other RNA
cttcggccccccaaagtgct

SEQ ID NO: 1603 - RNA, 20 nt, synthetic construct
  misc_feature 1..20: note = source = /note="Description of Artificial Sequence: Synthetic oligonucleotide"
  source 1..20: mol_type = other RNA
ccccaaagtgctgggattac

SEQ ID NO: 1604 - RNA, 20 nt, synthetic construct
  misc_feature 1..20: note = source = /note="Description of Artificial Sequence: Synthetic oligonucleotide"
  source 1..20: mol_type = other RNA
gccaaaccatttttgtgatt

SEQ ID NO: 1605 - RNA, 20 nt, synthetic construct
  misc_feature 1..20: note = source = /note="Description of Artificial Sequence: Synthetic oligonucleotide"
  source 1..20: mol_type = other RNA
ccaaaccatttttgtgattt

SEQ ID NO: 1606 - RNA, 20 nt, synthetic construct
  misc_feature 1..20: note = source = /note="Description of Artificial Sequence: Synthetic oligonucleotide"
  source 1..20: mol_type = other RNA
caaaccatttttgtgatttg

SEQ ID NO: 1607 - RNA, 20 nt, synthetic construct
  misc_feature 1..20: note = source = /note="Description of Artificial Sequence: Synthetic oligonucleotide"
  source 1..20: mol_type = other RNA
aacatgagcagatgatgctt

SEQ ID NO: 1608 - RNA, 20 nt, synthetic construct
  misc_feature 1..20: note = source = /note="Description of Artificial Sequence: Synthetic oligonucleotide"
  source 1..20: mol_type = other RNA
gcctttaaaaaattacatct

SEQ ID NO: 1609 - RNA, 20 nt, synthetic construct
  misc_feature 1..20: note = source = /note="Description of Artificial Sequence: Synthetic oligonucleotide"
  source 1..20: mol_type = other RNA
taaaaaattacatcttggcc

SEQ ID NO: 1610 - RNA, 20 nt, synthetic construct
  misc_feature 1..20: note = source = /note="Description of Artificial Sequence: Synthetic oligonucleotide"
  source 1..20: mol_type = other RNA
aaattacatcttggccagga

SEQ ID NO: 1611 - RNA, 20 nt, synthetic construct
  misc_feature 1..20: note = source = /note="Description of Artificial Sequence: Synthetic oligonucleotide"
  source 1..20: mol_type = other RNA
atggctcacgcctgtaatcc

SEQ ID NO: 1612 - RNA, 20 nt, synthetic construct
  misc_feature 1..20: note = source = /note="Description of Artificial Sequence: Synthetic oligonucleotide"
  source 1..20: mol_type = other RNA
cgcctgtaatcccggcattt

SEQ ID NO: 1613 - RNA, 20 nt, synthetic construct
  misc_feature 1..20: note = source = /note="Description of Artificial Sequence: Synthetic oligonucleotide"
  source 1..20: mol_type = other RNA
gcctgtaatcccggcatttt

SEQ ID NO: 1614 - RNA, 20 nt, synthetic construct
  misc_feature 1..20: note = source = /note="Description of Artificial Sequence: Synthetic oligonucleotide"
  source 1..20: mol_type = other RNA
tgtaatcccggcattttggg

SEQ ID NO: 1615 - RNA, 20 nt, synthetic construct
  misc_feature 1..20: note = source = /note="Description of Artificial Sequence: Synthetic oligonucleotide"
  source 1..20: mol_type = other RNA
cccggcattttgggaggcca

SEQ ID NO: 1616 - RNA, 20 nt, synthetic construct
  misc_feature 1..20: note = source = /note="Description of Artificial Sequence: Synthetic oligonucleotide"
  source 1..20: mol_type = other RNA
ggcattttgggaggccaagg

SEQ ID NO: 1617 - RNA, 20 nt, synthetic construct
  misc_feature 1..20: note = source = /note="Description of Artificial Sequence: Synthetic oligonucleotide"
  source 1..20: mol_type = other RNA
gcattttgggaggccaaggc

SEQ ID NO: 1618 - RNA, 20 nt, synthetic construct
  misc_feature 1..20: note = source = /note="Description of Artificial Sequence: Synthetic oligonucleotide"
  source 1..20: mol_type = other RNA
ttttgggaggccaaggcggg

SEQ ID NO: 1619 - RNA, 20 nt, synthetic construct
  misc_feature 1..20: note = source = /note="Description of Artificial Sequence: Synthetic oligonucleotide"
  source 1..20: mol_type = other RNA
gcaagagatcgagatcatcc

SEQ ID NO: 1620 - RNA, 20 nt, synthetic construct
  misc_feature 1..20: note = source = /note="Description of Artificial Sequence: Synthetic oligonucleotide"
  source 1..20: mol_type = other RNA
cgagatcatcctggccaaca

SEQ ID NO: 1621 - RNA, 20 nt, synthetic construct
  misc_feature 1..20: note = source = /note="Description of Artificial Sequence: Synthetic oligonucleotide"
  source 1..20: mol_type = other RNA
ctaaaaatacaaaaattagc

SEQ ID NO: 1622 - RNA, 20 nt, synthetic construct
  misc_feature 1..20: note = source = /note="Description of Artificial Sequence: Synthetic oligonucleotide"
  source 1..20: mol_type = other RNA
taaaaatacaaaaattagct

SEQ ID NO: 1623 - RNA, 20 nt, synthetic construct
  misc_feature 1..20: note = source = /note="Description of Artificial Sequence: Synthetic oligonucleotide"
  source 1..20: mol_type = other RNA
atacaaaaattagctgggcg

SEQ ID NO: 1624 - RNA, 20 nt, synthetic construct
  misc_feature 1..20: note = source = /note="Description of Artificial Sequence: Synthetic oligonucleotide"
  source 1..20: mol_type = other RNA
caaaaattagctgggcgtgg

SEQ ID NO: 1625 - RNA, 20 nt, synthetic construct
  misc_feature 1..20: note = source = /note="Description of Artificial Sequence: Synthetic oligonucleotide"
  source 1..20: mol_type = other RNA
aaattagctgggcgtggtgg

SEQ ID NO: 1626 - RNA, 20 nt, synthetic construct
  misc_feature 1..20: note = source = /note="Description of Artificial Sequence: Synthetic oligonucleotide"
  source 1..20: mol_type = other RNA
aattagctgggcgtggtggc

SEQ ID NO: 1627 - RNA, 20 nt, synthetic construct
  misc_feature 1..20: note = source = /note="Description of Artificial Sequence: Synthetic oligonucleotide"
  source 1..20: mol_type = other RNA
cgcctgtaatcccagctact

SEQ ID NO: 1628 - RNA, 20 nt, synthetic construct
  misc_feature 1..20: note = source = /note="Description of Artificial Sequence: Synthetic oligonucleotide"
  source 1..20: mol_type = other RNA
gcctgtaatcccagctactt

SEQ ID NO: 1629 - RNA, 20 nt, synthetic construct
  misc_feature 1..20: note = source = /note="Description of Artificial Sequence: Synthetic oligonucleotide"
  source 1..20: mol_type = other RNA
cccagctacttgggagactg

SEQ ID NO: 1630 - RNA, 20 nt, synthetic construct
  misc_feature 1..20: note = source = /note="Description of Artificial Sequence: Synthetic oligonucleotide"
  source 1..20: mol_type = other RNA
gctacttgggagactgtggc

SEQ ID NO: 1631 - RNA, 20 nt, synthetic construct
  misc_feature 1..20: note = source = /note="Description of Artificial Sequence: Synthetic oligonucleotide"
  source 1..20: mol_type = other RNA
gcaggagaatcgcttgaccc

SEQ ID NO: 1632 - RNA, 20 nt, synthetic construct
  misc_feature 1..20: note = source = /note="Description of Artificial Sequence: Synthetic oligonucleotide"
  source 1..20: mol_type = other RNA
caggagaatcgcttgacccc

SEQ ID NO: 1633 - RNA, 20 nt, synthetic construct
  misc_feature 1..20: note = source = /note="Description of Artificial Sequence: Synthetic oligonucleotide"
  source 1..20: mol_type = other RNA
gagaatcgcttgaccccggg

SEQ ID NO: 1634 - RNA, 20 nt, synthetic construct
  misc_feature 1..20: note = source = /note="Description of Artificial Sequence: Synthetic oligonucleotide"
  source 1..20: mol_type = other RNA
aatcgcttgaccccgggagg

SEQ ID NO: 1635 - RNA, 20 nt, synthetic construct
  misc_feature 1..20: note = source = /note="Description of Artificial Sequence: Synthetic oligonucleotide"
  source 1..20: mol_type = other RNA
cgcttgaccccgggaggcgg

SEQ ID NO: 1636 - RNA, 20 nt, synthetic construct
  misc_feature 1..20: note = source = /note="Description of Artificial Sequence: Synthetic oligonucleotide"
  source 1..20: mol_type = other RNA
cgcgccactgcactccagcc

SEQ ID NO: 1637 - RNA, 20 nt, synthetic construct
  misc_feature 1..20: note = source = /note="Description of Artificial Sequence: Synthetic oligonucleotide"
  source 1..20: mol_type = other RNA
gattgacttcccaaactaaa

SEQ ID NO: 1638 - RNA, 20 nt, synthetic construct
  misc_feature 1..20: note = source = /note="Description of Artificial Sequence: Synthetic oligonucleotide"
  source 1..20: mol_type = other RNA
aaaacactcaagaaaactct

SEQ ID NO: 1639 - RNA, 20 nt, synthetic construct
  misc_feature 1..20: note = source = /note="Description of Artificial Sequence: Synthetic oligonucleotide"
  source 1..20: mol_type = other RNA
agctttaagtctctatattt

SEQ ID NO: 1640 - RNA, 20 nt, synthetic construct
  misc_feature 1..20: note = source = /note="Description of Artificial Sequence: Synthetic oligonucleotide"
  source 1..20: mol_type = other RNA
gctttaagtctctatattta

SEQ ID NO: 1641 - RNA, 20 nt, synthetic construct
  misc_feature 1..20: note = source = /note="Description of Artificial Sequence: Synthetic oligonucleotide"
  source 1..20: mol_type = other RNA
gcaagttgaaataaaaaaaa

SEQ ID NO: 1642 - RNA, 20 nt, synthetic construct
  misc_feature 1..20: note = source = /note="Description of Artificial Sequence: Synthetic oligonucleotide"
  source 1..20: mol_type = other RNA
aatgtctaaccacgtatatt

SEQ ID NO: 1643 - RNA, 20 nt, synthetic construct
  misc_feature 1..20: note = source = /note="Description of Artificial Sequence: Synthetic oligonucleotide"
  source 1..20: mol_type = other RNA
tatatttggtatatgtatac

SEQ ID NO: 1644 - RNA, 20 nt, synthetic construct
  misc_feature 1..20: note = source = /note="Description of Artificial Sequence: Synthetic oligonucleotide"
  source 1..20: mol_type = other RNA
tgtattagctgtaagcagac

SEQ ID NO: 1645 - RNA, 20 nt, synthetic construct
  misc_feature 1..20: note = source = /note="Description of Artificial Sequence: Synthetic oligonucleotide"
  source 1..20: mol_type = other RNA
ttctttttgtattgcatcta

SEQ ID NO: 1646 - RNA, 20 nt, synthetic construct
  misc_feature 1..20: note = source = /note="Description of Artificial Sequence: Synthetic oligonucleotide"
  source 1..20: mol_type = other RNA
catctaaggatcatttgaga

SEQ ID NO: 1647 - RNA, 20 nt, synthetic construct
  misc_feature 1..20: note = source = /note="Description of Artificial Sequence: Synthetic oligonucleotide"
  source 1..20: mol_type = other RNA
tacactacctttctaaagat

SEQ ID NO: 1648 - RNA, 20 nt, synthetic construct
  misc_feature 1..20: note = source = /note="Description of Artificial Sequence: Synthetic oligonucleotide"
  source 1..20: mol_type = other RNA
atatgtattttttaaaataa

SEQ ID NO: 1649 - RNA, 20 nt, synthetic construct
  misc_feature 1..20: note = source = /note="Description of Artificial Sequence: Synthetic oligonucleotide"
  source 1..20: mol_type = other RNA
caagcaccaaatctgttttt

SEQ ID NO: 1650 - RNA, 20 nt, synthetic construct
  misc_feature 1..20: note = source = /note="Description of Artificial Sequence: Synthetic oligonucleotide"
  source 1..20: mol_type = other RNA
aagcaccaaatctgtttttt

SEQ ID NO: 1651 - RNA, 20 nt, synthetic construct
  misc_feature 1..20: note = source = /note="Description of Artificial Sequence: Synthetic oligonucleotide"
  source 1..20: mol_type = other RNA
agcaccaaatctgttttttg

SEQ ID NO: 1652 - RNA, 20 nt, synthetic construct
  misc_feature 1..20: note = source = /note="Description of Artificial Sequence: Synthetic oligonucleotide"
  source 1..20: mol_type = other RNA
gcaccaaatctgttttttgg

SEQ ID NO: 1653 - RNA, 20 nt, synthetic construct
  misc_feature 1..20: note = source = /note="Description of Artificial Sequence: Synthetic oligonucleotide"
  source 1..20: mol_type = other RNA
tctgttttttgggggttttt

SEQ ID NO: 1654 - RNA, 20 nt, synthetic construct
  misc_feature 1..20: note = source = /note="Description of Artificial Sequence: Synthetic oligonucleotide"
  source 1..20: mol_type = other RNA
ttgggggttttttggtttgt

SEQ ID NO: 1655 - RNA, 20 nt, synthetic construct
  misc_feature 1..20: note = source = /note="Description of Artificial Sequence: Synthetic oligonucleotide"
  source 1..20: mol_type = other RNA
agagtctccctctgtcgccc

SEQ ID NO: 1656 - RNA, 20 nt, synthetic construct
  misc_feature 1..20: note = source = /note="Description of Artificial Sequence: Synthetic oligonucleotide"
  source 1..20: mol_type = other RNA
tctccctctgtcgcccaggc

SEQ ID NO: 1657 - RNA, 20 nt, synthetic construct
  misc_feature 1..20: note = source = /note="Description of Artificial Sequence: Synthetic oligonucleotide"
  source 1..20: mol_type = other RNA
tcgcccaggctggagtgaag

SEQ ID NO: 1658 - RNA, 20 nt, synthetic construct
  misc_feature 1..20: note = source = /note="Description of Artificial Sequence: Synthetic oligonucleotide"
  source 1..20: mol_type = other RNA
tggagtgaagcggagcgatc

SEQ ID NO: 1659 - RNA, 20 nt, synthetic construct
  misc_feature 1..20: note = source = /note="Description of Artificial Sequence: Synthetic oligonucleotide"
  source 1..20: mol_type = other RNA
ggagtgaagcggagcgatct

SEQ ID NO: 1660 - RNA, 20 nt, synthetic construct
  misc_feature 1..20: note = source = /note="Description of Artificial Sequence: Synthetic oligonucleotide"
  source 1..20: mol_type = other RNA
tcaccgcaacctccgcctcc

SEQ ID NO: 1661 - RNA, 20 nt, synthetic construct
  misc_feature 1..20: note = source = /note="Description of Artificial Sequence: Synthetic oligonucleotide"
  source 1..20: mol_type = other RNA
caccgcaacctccgcctcct

SEQ ID NO: 1662 - RNA, 20 nt, synthetic construct
  misc_feature 1..20: note = source = /note="Description of Artificial Sequence: Synthetic oligonucleotide"
  source 1..20: mol_type = other RNA
ttccagcaattctctgcctc

SEQ ID NO: 1663 - RNA, 20 nt, synthetic construct
  misc_feature 1..20: note = source = /note="Description of Artificial Sequence: Synthetic oligonucleotide"
  source 1..20: mol_type = other RNA
caattctctgcctcaggctt

SEQ ID NO: 1664 - RNA, 20 nt, synthetic construct
  misc_feature 1..20: note = source = /note="Description of Artificial Sequence: Synthetic oligonucleotide"
  source 1..20: mol_type = other RNA
gcctcaggcttcggagtagc

SEQ ID NO: 1665 - RNA, 20 nt, synthetic construct
  misc_feature 1..20: note = source = /note="Description of Artificial Sequence: Synthetic oligonucleotide"
  source 1..20: mol_type = other RNA
cctcaggcttcggagtagct

SEQ ID NO: 1666 - RNA, 20 nt, synthetic construct
  misc_feature 1..20: note = source = /note="Description of Artificial Sequence: Synthetic oligonucleotide"
  source 1..20: mol_type = other RNA
ttcggagtagctgggattac

SEQ ID NO: 1667 - RNA, 20 nt, synthetic construct
  misc_feature 1..20: note = source = /note="Description of Artificial Sequence: Synthetic oligonucleotide"
  source 1..20: mol_type = other RNA
caggcactcgccaccacgcc

SEQ ID NO: 1668 - RNA, 20 nt, synthetic construct
  misc_feature 1..20: note = source = /note="Description of Artificial Sequence: Synthetic oligonucleotide"
  source 1..20: mol_type = other RNA
aatttttgtatttttagtag

SEQ ID NO: 1669 - RNA, 20 nt, synthetic construct
  misc_feature 1..20: note = source = /note="Description of Artificial Sequence: Synthetic oligonucleotide"
  source 1..20: mol_type = other RNA
ttttgtatttttagtagagg

SEQ ID NO: 1670 - RNA, 20 nt, synthetic construct
  misc_feature 1..20: note = source = /note="Description of Artificial Sequence: Synthetic oligonucleotide"
  source 1..20: mol_type = other RNA
tttgtatttttagtagaggc

SEQ ID NO: 1671 - RNA, 20 nt, synthetic construct
  misc_feature 1..20: note = source = /note="Description of Artificial Sequence: Synthetic oligonucleotide"
  source 1..20: mol_type = other RNA
ttgtatttttagtagaggcg

SEQ ID NO: 1672 - RNA, 20 nt, synthetic construct
  misc_feature 1..20: note = source = /note="Description of Artificial Sequence: Synthetic oligonucleotide"
  source 1..20: mol_type = other RNA
gaggcggggttttaccatct

SEQ ID NO: 1673 - RNA, 20 nt, synthetic construct
  misc_feature 1..20: note = source = /note="Description of Artificial Sequence: Synthetic oligonucleotide"
  source 1..20: mol_type = other RNA
ggggttttaccatcttggtc

SEQ ID NO: 1674 - RNA, 20 nt, synthetic construct
  misc_feature 1..20: note = source = /note="Description of Artificial Sequence: Synthetic oligonucleotide"
  source 1..20: mol_type = other RNA
ttttaccatcttggtcaggc

SEQ ID NO: 1675 - RNA, 20 nt, synthetic construct
  misc_feature 1..20: note = source = /note="Description of Artificial Sequence: Synthetic oligonucleotide"
  source 1..20: mol_type = other RNA
ctggttttgaactcctgacc

SEQ ID NO: 1676 - RNA, 20 nt, synthetic construct
  misc_feature 1..20: note = source = /note="Description of Artificial Sequence: Synthetic oligonucleotide"
  source 1..20: mol_type = other RNA
gcctcagcctcccaaagtgc

SEQ ID NO: 1677 - RNA, 20 nt, synthetic construct
  misc_feature 1..20: note = source = /note="Description of Artificial Sequence: Synthetic oligonucleotide"
  source 1..20: mol_type = other RNA
cctcagcctcccaaagtgct

SEQ ID NO: 1678 - RNA, 20 nt, synthetic construct
  misc_feature 1..20: note = source = /note="Description of Artificial Sequence: Synthetic oligonucleotide"
  source 1..20: mol_type = other RNA
tcccaaagtgctgggattac

SEQ ID NO: 1679 - RNA, 20 nt, synthetic construct
  misc_feature 1..20: note = source = /note="Description of Artificial Sequence: Synthetic oligonucleotide"
  source 1..20: mol_type = other RNA
gtttttctttaagtaatact

SEQ ID NO: 1680 - RNA, 20 nt, synthetic construct
  misc_feature 1..20: note = source = /note="Description of Artificial Sequence: Synthetic oligonucleotide"
  source 1..20: mol_type = other RNA
gtataagagaactttatatc

SEQ ID NO: 1681 - RNA, 20 nt, synthetic construct
  misc_feature 1..20: note = source = /note="Description of Artificial Sequence: Synthetic oligonucleotide"
  source 1..20: mol_type = other RNA
ttattcacatatagaaactc

SEQ ID NO: 1682 - RNA, 20 nt, synthetic construct
  misc_feature 1..20: note = source = /note="Description of Artificial Sequence: Synthetic oligonucleotide"
  source 1..20: mol_type = other RNA
ctaaagctgttctcatttag

SEQ ID NO: 1683 - RNA, 20 nt, synthetic construct
  misc_feature 1..20: note = source = /note="Description of Artificial Sequence: Synthetic oligonucleotide"
  source 1..20: mol_type = other RNA
ttaactaacaataaaatcta

SEQ ID NO: 1684 - RNA, 20 nt, synthetic construct
  misc_feature 1..20: note = source = /note="Description of Artificial Sequence: Synthetic oligonucleotide"
  source 1..20: mol_type = other RNA
gcagagcaaaagcagccttc

SEQ ID NO: 1685 - RNA, 20 nt, synthetic construct
  misc_feature 1..20: note = source = /note="Description of Artificial Sequence: Synthetic oligonucleotide"
  source 1..20: mol_type = other RNA
aattaagatgcgatgagagt

SEQ ID NO: 1686 - RNA, 20 nt, synthetic construct
  misc_feature 1..20: note = source = /note="Description of Artificial Sequence: Synthetic oligonucleotide"
  source 1..20: mol_type = other RNA
tctacttgcttttttagtgt

SEQ ID NO: 1687 - RNA, 20 nt, synthetic construct
  misc_feature 1..20: note = source = /note="Description of Artificial Sequence: Synthetic oligonucleotide"
  source 1..20: mol_type = other RNA
gtatttctctcaattatcct

SEQ ID NO: 1688 - RNA, 20 nt, synthetic construct
  misc_feature 1..20: note = source = /note="Description of Artificial Sequence: Synthetic oligonucleotide"
  source 1..20: mol_type = other RNA
cggcctaaatagtaaaagct

SEQ ID NO: 1689 - RNA, 20 nt, synthetic construct
  misc_feature 1..20: note = source = /note="Description of Artificial Sequence: Synthetic oligonucleotide"
  source 1..20: mol_type = other RNA
ggcctaaatagtaaaagctt

SEQ ID NO: 1690 - RNA, 20 nt, synthetic construct
  misc_feature 1..20: note = source = /note="Description of Artificial Sequence: Synthetic oligonucleotide"
  source 1..20: mol_type = other RNA
ttaatattttccctctttct

SEQ ID NO: 1691 - RNA, 20 nt, synthetic construct
  misc_feature 1..20: note = source = /note="Description of Artificial Sequence: Synthetic oligonucleotide"
  source 1..20: mol_type = other RNA
gtttcacagtaaatcatata

SEQ ID NO: 1692 - RNA, 20 nt, synthetic construct
  misc_feature 1..20: note = source = /note="Description of Artificial Sequence: Synthetic oligonucleotide"
  source 1..20: mol_type = other RNA
aagtgctcagaatttgatta

SEQ ID NO: 1693 - RNA, 20 nt, synthetic construct
  misc_feature 1..20: note = source = /note="Description of Artificial Sequence: Synthetic oligonucleotide"
  source 1..20: mol_type = other RNA
aagttaatttctactaaaaa

SEQ ID NO: 1694 - RNA, 20 nt, synthetic construct
  misc_feature 1..20: note = source = /note="Description of Artificial Sequence: Synthetic oligonucleotide"
  source 1..20: mol_type = other RNA
agttaatttctactaaaaaa

SEQ ID NO: 1695 - RNA, 20 nt, synthetic construct
  misc_feature 1..20: note = source = /note="Description of Artificial Sequence: Synthetic oligonucleotide"
  source 1..20: mol_type = other RNA
attcaaatagaactttcatt

SEQ ID NO: 1696 - RNA, 20 nt, synthetic construct
  misc_feature 1..20: note = source = /note="Description of Artificial Sequence: Synthetic oligonucleotide"
  source 1..20: mol_type = other RNA
tgtactgtagtttcacttga

SEQ ID NO: 1697 - RNA, 20 nt, synthetic construct
  misc_feature 1..20: note = source = /note="Description of Artificial Sequence: Synthetic oligonucleotide"
  source 1..20: mol_type = other RNA
gtactgtagtttcacttgaa

SEQ ID NO: 1698 - RNA, 20 nt, synthetic construct
  misc_feature 1..20: note = source = /note="Description of Artificial Sequence: Synthetic oligonucleotide"
  source 1..20: mol_type = other RNA
tactgtagtttcacttgaag

SEQ ID NO: 1699 - RNA, 20 nt, synthetic construct
  misc_feature 1..20: note = source = /note="Description of Artificial Sequence: Synthetic oligonucleotide"
  source 1..20: mol_type = other RNA
cattgacttattcaatgcat

SEQ ID NO: 1700 - RNA, 20 nt, synthetic construct
  misc_feature 1..20: note = source = /note="Description of Artificial Sequence: Synthetic oligonucleotide"
  source 1..20: mol_type = other RNA
tgtattataaaatatcagaa

SEQ ID NO: 1701 - RNA, 20 nt, synthetic construct
  misc_feature 1..20: note = source = /note="Description of Artificial Sequence: Synthetic oligonucleotide"
  source 1..20: mol_type = other RNA
attgaatctgatgcatacca

SEQ ID NO: 1702 - RNA, 20 nt, synthetic construct
  misc_feature 1..20: note = source = /note="Description of Artificial Sequence: Synthetic oligonucleotide"
  source 1..20: mol_type = other RNA
atgcataccaaggagcaatg

SEQ ID NO: 1703 - RNA, 20 nt, synthetic construct
  misc_feature 1..20: note = source = /note="Description of Artificial Sequence: Synthetic oligonucleotide"
  source 1..20: mol_type = other RNA
aggagcaatgtggaaatttt

SEQ ID NO: 1704 - RNA, 20 nt, synthetic construct
  misc_feature 1..20: note = source = /note="Description of Artificial Sequence: Synthetic oligonucleotide"
  source 1..20: mol_type = other RNA
tactactaagtgtgtgtatg

SEQ ID NO: 1705 - RNA, 20 nt, synthetic construct
  misc_feature 1..20: note = source = /note="Description of Artificial Sequence: Synthetic oligonucleotide"
  source 1..20: mol_type = other RNA
tatttaagctgaatcctctt

SEQ ID NO: 1706 - RNA, 20 nt, synthetic construct
  misc_feature 1..20: note = source = /note="Description of Artificial Sequence: Synthetic oligonucleotide"
  source 1..20: mol_type = other RNA
tgaatcctctttggtagaaa

SEQ ID NO: 1707 - RNA, 20 nt, synthetic construct
  misc_feature 1..20: note = source = /note="Description of Artificial Sequence: Synthetic oligonucleotide"
  source 1..20: mol_type = other RNA
ttgaaagtgcacagaatcct

SEQ ID NO: 1708 - RNA, 20 nt, synthetic construct
  misc_feature 1..20: note = source = /note="Description of Artificial Sequence: Synthetic oligonucleotide"
  source 1..20: mol_type = other RNA
tgaaagtgcacagaatcctt

SEQ ID NO: 1709 - RNA, 20 nt, synthetic construct
  misc_feature 1..20: note = source = /note="Description of Artificial Sequence: Synthetic oligonucleotide"
  source 1..20: mol_type = other RNA
gaaagtgcacagaatccttg

SEQ ID NO: 1710 - RNA, 20 nt, synthetic construct
  misc_feature 1..20: note = source = /note="Description of Artificial Sequence: Synthetic oligonucleotide"
  source 1..20: mol_type = other RNA
ttgtataaactgtttttata

SEQ ID NO: 1711 - RNA, 20 nt, synthetic construct
  misc_feature 1..20: note = source = /note="Description of Artificial Sequence: Synthetic oligonucleotide"
  source 1..20: mol_type = other RNA
gttcctgtagaagacagctg

SEQ ID NO: 1712 - RNA, 20 nt, synthetic construct
  misc_feature 1..20: note = source = /note="Description of Artificial Sequence: Synthetic oligonucleotide"
  source 1..20: mol_type = other RNA
cacaaaacaaacagcttgct

SEQ ID NO: 1713 - RNA, 20 nt, synthetic construct
  misc_feature 1..20: note = source = /note="Description of Artificial Sequence: Synthetic oligonucleotide"
  source 1..20: mol_type = other RNA
gtgatgataacattcgtgca

SEQ ID NO: 1714 - RNA, 20 nt, synthetic construct
  misc_feature 1..20: note = source = /note="Description of Artificial Sequence: Synthetic oligonucleotide"
  source 1..20: mol_type = other RNA
tgatgataacattcgtgcaa

SEQ ID NO: 1715 - RNA, 20 nt, synthetic construct
  misc_feature 1..20: note = source = /note="Description of Artificial Sequence: Synthetic oligonucleotide"
  source 1..20: mol_type = other RNA
aagggagttctctcttgcat

SEQ ID NO: 1716 - RNA, 20 nt, synthetic construct
  misc_feature 1..20: note = source = /note="Description of Artificial Sequence: Synthetic oligonucleotide"
  source 1..20: mol_type = other RNA
ctctcttgcataggagtccc

SEQ ID NO: 1717 - RNA, 20 nt, synthetic construct
  misc_feature 1..20: note = source = /note="Description of Artificial Sequence: Synthetic oligonucleotide"
  source 1..20: mol_type = other RNA
taccctaatgccttcccaca

SEQ ID NO: 1718 - RNA, 20 nt, synthetic construct
  misc_feature 1..20: note = source = /note="Description of Artificial Sequence: Synthetic oligonucleotide"
  source 1..20: mol_type = other RNA
ttcccacatggtcaaacaca

SEQ ID NO: 1719 - RNA, 20 nt, synthetic construct
  misc_feature 1..20: note = source = /note="Description of Artificial Sequence: Synthetic oligonucleotide"
  source 1..20: mol_type = other RNA
agcctgcagttgtttatcag

SEQ ID NO: 1720 - RNA, 20 nt, synthetic construct
  misc_feature 1..20: note = source = /note="Description of Artificial Sequence: Synthetic oligonucleotide"
  source 1..20: mol_type = other RNA
gcctgcagttgtttatcagt

SEQ ID NO: 1721 - RNA, 20 nt, synthetic construct
  misc_feature 1..20: note = source = /note="Description of Artificial Sequence: Synthetic oligonucleotide"
  source 1..20: mol_type = other RNA
gttgtttatcagtgggatac

SEQ ID NO: 1722 - RNA, 20 nt, synthetic construct
  misc_feature 1..20: note = source = /note="Description of Artificial Sequence: Synthetic oligonucleotide"
  source 1..20: mol_type = other RNA
ttgtttatcagtgggataca

SEQ ID NO: 1723 - RNA, 20 nt, synthetic construct
  misc_feature 1..20: note = source = /note="Description of Artificial Sequence: Synthetic oligonucleotide"
  source 1..20: mol_type = other RNA
tgggatacagggagaaagag

SEQ ID NO: 1724 - RNA, 20 nt, synthetic construct
  misc_feature 1..20: note = source = /note="Description of Artificial Sequence: Synthetic oligonucleotide"
  source 1..20: mol_type = other RNA
ttactaactgtttaatgacc

SEQ ID NO: 1725 - RNA, 20 nt, synthetic construct
  misc_feature 1..20: note = source = /note="Description of Artificial Sequence: Synthetic oligonucleotide"
  source 1..20: mol_type = other RNA
gatacagaataagaaagcac

SEQ ID NO: 1726 - RNA, 20 nt, synthetic construct
  misc_feature 1..20: note = source = /note="Description of Artificial Sequence: Synthetic oligonucleotide"
  source 1..20: mol_type = other RNA
gaaagcactggcctgactgc

SEQ ID NO: 1727 - RNA, 20 nt, synthetic construct
  misc_feature 1..20: note = source = /note="Description of Artificial Sequence: Synthetic oligonucleotide"
  source 1..20: mol_type = other RNA
aaagcactggcctgactgca

SEQ ID NO: 1728 - RNA, 20 nt, synthetic construct
  misc_feature 1..20: note = source = /note="Description of Artificial Sequence: Synthetic oligonucleotide"
  source 1..20: mol_type = other RNA
aagcactggcctgactgcag

SEQ ID NO: 1729 - RNA, 20 nt, synthetic construct
  misc_feature 1..20: note = source = /note="Description of Artificial Sequence: Synthetic oligonucleotide"
  source 1..20: mol_type = other RNA
gcctgactgcaggggaaaca

SEQ ID NO: 1730 - RNA, 20 nt, synthetic construct
  misc_feature 1..20: note = source = /note="Description of Artificial Sequence: Synthetic oligonucleotide"
  source 1..20: mol_type = other RNA
gaaacatggtagatgcctaa

SEQ ID NO: 1731 - RNA, 20 nt, synthetic construct
  misc_feature 1..20: note = source = /note="Description of Artificial Sequence: Synthetic oligonucleotide"
  source 1..20: mol_type = other RNA
acatggtagatgcctaaagg

SEQ ID NO: 1732 - RNA, 20 nt, synthetic construct
  misc_feature 1..20: note = source = /note="Description of Artificial Sequence: Synthetic oligonucleotide"
  source 1..20: mol_type = other RNA
aactatcattatcacctgaa

SEQ ID NO: 1733 - RNA, 20 nt, synthetic construct
  misc_feature 1..20: note = source = /note="Description of Artificial Sequence: Synthetic oligonucleotide"
  source 1..20: mol_type = other RNA
tttaaccctgacaagcaagt

SEQ ID NO: 1734 - RNA, 20 nt, synthetic construct
  misc_feature 1..20: note = source = /note="Description of Artificial Sequence: Synthetic oligonucleotide"
  source 1..20: mol_type = other RNA
ctttagtattcaagaactga

SEQ ID NO: 1735 - RNA, 20 nt, synthetic construct
  misc_feature 1..20: note = source = /note="Description of Artificial Sequence: Synthetic oligonucleotide"
  source 1..20: mol_type = other RNA
actgaaggtgacaagccctg

SEQ ID NO: 1736 - RNA, 20 nt, synthetic construct
  misc_feature 1..20: note = source = /note="Description of Artificial Sequence: Synthetic oligonucleotide"
  source 1..20: mol_type = other RNA
catgccttcatagaaacagt

SEQ ID NO: 1737 - RNA, 20 nt, synthetic construct
  misc_feature 1..20: note = source = /note="Description of Artificial Sequence: Synthetic oligonucleotide"
  source 1..20: mol_type = other RNA
gaactattttgcttaacatt

SEQ ID NO: 1738 - RNA, 20 nt, synthetic construct
  misc_feature 1..20: note = source = /note="Description of Artificial Sequence: Synthetic oligonucleotide"
  source 1..20: mol_type = other RNA
agcctatatctgcaataata

SEQ ID NO: 1739 - RNA, 20 nt, synthetic construct
  misc_feature 1..20: note = source = /note="Description of Artificial Sequence: Synthetic oligonucleotide"
  source 1..20: mol_type = other RNA
gcctatatctgcaataatac

SEQ ID NO: 1740 - RNA, 20 nt, synthetic construct
  misc_feature 1..20: note = source = /note="Description of Artificial Sequence: Synthetic oligonucleotide"
  source 1..20: mol_type = other RNA
cctatatctgcaataatacg

SEQ ID NO: 1741 - RNA, 20 nt, synthetic construct
  misc_feature 1..20: note = source = /note="Description of Artificial Sequence: Synthetic oligonucleotide"
  source 1..20: mol_type = other RNA
taatgataaagagaaagaaa

SEQ ID NO: 1742 - RNA, 20 nt, synthetic construct
  misc_feature 1..20: note = source = /note="Description of Artificial Sequence: Synthetic oligonucleotide"
  source 1..20: mol_type = other RNA
gaaaaggtgagaagtaattt

SEQ ID NO: 1743 - RNA, 20 nt, synthetic construct
  misc_feature 1..20: note = source = /note="Description of Artificial Sequence: Synthetic oligonucleotide"
  source 1..20: mol_type = other RNA
aaaaggtgagaagtaatttt

SEQ ID NO: 1744 - RNA, 20 nt, synthetic construct
  misc_feature 1..20: note = source = /note="Description of Artificial Sequence: Synthetic oligonucleotide"
  source 1..20: mol_type = other RNA
aatatgcaatgataaactag

SEQ ID NO: 1745 - RNA, 20 nt, synthetic construct
  misc_feature 1..20: note = source = /note="Description of Artificial Sequence: Synthetic oligonucleotide"
  source 1..20: mol_type = other RNA
accagcagctgtgcttagca

SEQ ID NO: 1746 - RNA, 20 nt, synthetic construct
  misc_feature 1..20: note = source = /note="Description of Artificial Sequence: Synthetic oligonucleotide"
  source 1..20: mol_type = other RNA
agcatggataattgcctaaa

SEQ ID NO: 1747 - RNA, 20 nt, synthetic construct
  misc_feature 1..20: note = source = /note="Description of Artificial Sequence: Synthetic oligonucleotide"
  source 1..20: mol_type = other RNA
gagaaaaaaaagtaaaaatc

SEQ ID NO: 1748 - RNA, 20 nt, synthetic construct
  misc_feature 1..20: note = source = /note="Description of Artificial Sequence: Synthetic oligonucleotide"
  source 1..20: mol_type = other RNA
gcttataagacattgccacc

SEQ ID NO: 1749 - RNA, 20 nt, synthetic construct
  misc_feature 1..20: note = source = /note="Description of Artificial Sequence: Synthetic oligonucleotide"
  source 1..20: mol_type = other RNA
tattttcaaacatagaatca

SEQ ID NO: 1750 - RNA, 20 nt, synthetic construct
  misc_feature 1..20: note = source = /note="Description of Artificial Sequence: Synthetic oligonucleotide"
  source 1..20: mol_type = other RNA
atggattgctacaagctgaa

SEQ ID NO: 1751 - RNA, 20 nt, synthetic construct
  misc_feature 1..20: note = source = /note="Description of Artificial Sequence: Synthetic oligonucleotide"
  source 1..20: mol_type = other RNA
tgcatttacagatgagaaaa

SEQ ID NO: 1752 - RNA, 20 nt, synthetic construct
  misc_feature 1..20: note = source = /note="Description of Artificial Sequence: Synthetic oligonucleotide"
  source 1..20: mol_type = other RNA
atttacagatgagaaaatgg

SEQ ID NO: 1753 - RNA, 20 nt, synthetic construct
  misc_feature 1..20: note = source = /note="Description of Artificial Sequence: Synthetic oligonucleotide"
  source 1..20: mol_type = other RNA
cagatgagaaaatggaggca

SEQ ID NO: 1754 - RNA, 20 nt, synthetic construct
  misc_feature 1..20: note = source = /note="Description of Artificial Sequence: Synthetic oligonucleotide"
  source 1..20: mol_type = other RNA
agatgagaaaatggaggcat

SEQ ID NO: 1755 - RNA, 20 nt, synthetic construct
  misc_feature 1..20: note = source = /note="Description of Artificial Sequence: Synthetic oligonucleotide"
  source 1..20: mol_type = other RNA
tattgattaagttcttatgt

SEQ ID NO: 1756 - RNA, 20 nt, synthetic construct
  misc_feature 1..20: note = source = /note="Description of Artificial Sequence: Synthetic oligonucleotide"
  source 1..20: mol_type = other RNA
attgattaagttcttatgtt

SEQ ID NO: 1757 - RNA, 20 nt, synthetic construct
  misc_feature 1..20: note = source = /note="Description of Artificial Sequence: Synthetic oligonucleotide"
  source 1..20: mol_type = other RNA
tatgtcatctatatttttgt

SEQ ID NO: 1758 - RNA, 20 nt, synthetic construct
  misc_feature 1..20: note = source = /note="Description of Artificial Sequence: Synthetic oligonucleotide"
  source 1..20: mol_type = other RNA
ttactctcctcactttacta

SEQ ID NO: 1759 - RNA, 20 nt, synthetic construct
  misc_feature 1..20: note = source = /note="Description of Artificial Sequence: Synthetic oligonucleotide"
  source 1..20: mol_type = other RNA
ctaaggaagaaaccaagaca

SEQ ID NO: 1760 - RNA, 20 nt, synthetic construct
  misc_feature 1..20: note = source = /note="Description of Artificial Sequence: Synthetic oligonucleotide"
  source 1..20: mol_type = other RNA
taaggaagaaaccaagacat

SEQ ID NO: 1761 - RNA, 20 nt, synthetic construct
  misc_feature 1..20: note = source = /note="Description of Artificial Sequence: Synthetic oligonucleotide"
  source 1..20: mol_type = other RNA
aaggaagaaaccaagacatg

SEQ ID NO: 1762 - RNA, 20 nt, synthetic construct
  misc_feature 1..20: note = source = /note="Description of Artificial Sequence: Synthetic oligonucleotide"
  source 1..20: mol_type = other RNA
tataaattttgaattatctt

SEQ ID NO: 1763 - RNA, 20 nt, synthetic construct
  misc_feature 1..20: note = source = /note="Description of Artificial Sequence: Synthetic oligonucleotide"
  source 1..20: mol_type = other RNA
taaatcaactcttaaacagt

SEQ ID NO: 1764 - RNA, 20 nt, synthetic construct
  misc_feature 1..20: note = source = /note="Description of Artificial Sequence: Synthetic oligonucleotide"
  source 1..20: mol_type = other RNA
ttggatgccaacaagcagtc

SEQ ID NO: 1765 - RNA, 20 nt, synthetic construct
  misc_feature 1..20: note = source = /note="Description of Artificial Sequence: Synthetic oligonucleotide"
  source 1..20: mol_type = other RNA
ccaacaagcagtctggtgtt

SEQ ID NO: 1766 - RNA, 20 nt, synthetic construct
  misc_feature 1..20: note = source = /note="Description of Artificial Sequence: Synthetic oligonucleotide"
  source 1..20: mol_type = other RNA
tgtgtgttccagctttgttg

SEQ ID NO: 1767 - RNA, 20 nt, synthetic construct
  misc_feature 1..20: note = source = /note="Description of Artificial Sequence: Synthetic oligonucleotide"
  source 1..20: mol_type = other RNA
gtgaagtgattattactatc

SEQ ID NO: 1768 - RNA, 20 nt, synthetic construct
  misc_feature 1..20: note = source = /note="Description of Artificial Sequence: Synthetic oligonucleotide"
  source 1..20: mol_type = other RNA
tcagtcattttttgtgttta

SEQ ID NO: 1769 - RNA, 20 nt, synthetic construct
  misc_feature 1..20: note = source = /note="Description of Artificial Sequence: Synthetic oligonucleotide"
  source 1..20: mol_type = other RNA
gagctactcaaatgtagtca

SEQ ID NO: 1770 - RNA, 20 nt, synthetic construct
  misc_feature 1..20: note = source = /note="Description of Artificial Sequence: Synthetic oligonucleotide"
  source 1..20: mol_type = other RNA
gaatgtattaaatattcatc

SEQ ID NO: 1771 - RNA, 20 nt, synthetic construct
  misc_feature 1..20: note = source = /note="Description of Artificial Sequence: Synthetic oligonucleotide"
  source 1..20: mol_type = other RNA
ttcccctactacccagccca

SEQ ID NO: 1772 - RNA, 20 nt, synthetic construct
  misc_feature 1..20: note = source = /note="Description of Artificial Sequence: Synthetic oligonucleotide"
  source 1..20: mol_type = other RNA
tataagtgagatcatgcaat

SEQ ID NO: 1773 - RNA, 20 nt, synthetic construct
  misc_feature 1..20: note = source = /note="Description of Artificial Sequence: Synthetic oligonucleotide"
  source 1..20: mol_type = other RNA
tagctgtgtatgtcatattc

SEQ ID NO: 1774 - RNA, 20 nt, synthetic construct
  misc_feature 1..20: note = source = /note="Description of Artificial Sequence: Synthetic oligonucleotide"
  source 1..20: mol_type = other RNA
aactaataattcttatctca

SEQ ID NO: 1775 - RNA, 20 nt, synthetic construct
  misc_feature 1..20: note = source = /note="Description of Artificial Sequence: Synthetic oligonucleotide"
  source 1..20: mol_type = other RNA
ttatctcatggattactgag

SEQ ID NO: 1776 - RNA, 20 nt, synthetic construct
  misc_feature 1..20: note = source = /note="Description of Artificial Sequence: Synthetic oligonucleotide"
  source 1..20: mol_type = other RNA
aaaacatccagcatgttact

SEQ ID NO: 1777 - RNA, 20 nt, synthetic construct
  misc_feature 1..20: note = source = /note="Description of Artificial Sequence: Synthetic oligonucleotide"
  source 1..20: mol_type = other RNA
gtgttgagcatctatgtatc

SEQ ID NO: 1778 - RNA, 20 nt, synthetic construct
  misc_feature 1..20: note = source = /note="Description of Artificial Sequence: Synthetic oligonucleotide"
  source 1..20: mol_type = other RNA
agccatcatctttacccttc

SEQ ID NO: 1779 - RNA, 20 nt, synthetic construct
  misc_feature 1..20: note = source = /note="Description of Artificial Sequence: Synthetic oligonucleotide"
  source 1..20: mol_type = other RNA
tttacccttctggaatatac

SEQ ID NO: 1780 - RNA, 20 nt, synthetic construct
  misc_feature 1..20: note = source = /note="Description of Artificial Sequence: Synthetic oligonucleotide"
  source 1..20: mol_type = other RNA
tctggaatatacaggctcat

SEQ ID NO: 1781 - RNA, 20 nt, synthetic construct
  misc_feature 1..20: note = source = /note="Description of Artificial Sequence: Synthetic oligonucleotide"
  source 1..20: mol_type = other RNA
cataatgagatgaaaattat

SEQ ID NO: 1782 - RNA, 20 nt, synthetic construct
  misc_feature 1..20: note = source = /note="Description of Artificial Sequence: Synthetic oligonucleotide"
  source 1..20: mol_type = other RNA
aaattataggactcatagac

SEQ ID NO: 1783 - RNA, 20 nt, synthetic construct
  misc_feature 1..20: note = source = /note="Description of Artificial Sequence: Synthetic oligonucleotide"
  source 1..20: mol_type = other RNA
actcatagactggtcagttg

SEQ ID NO: 1784 - RNA, 20 nt, synthetic construct
  misc_feature 1..20: note = source = /note="Description of Artificial Sequence: Synthetic oligonucleotide"
  source 1..20: mol_type = other RNA
ggtcagttgaggaatttccc

SEQ ID NO: 1785 - RNA, 20 nt, synthetic construct
  misc_feature 1..20: note = source = /note="Description of Artificial Sequence: Synthetic oligonucleotide"
  source 1..20: mol_type = other RNA
gcttccagcctctgctcaaa

SEQ ID NO: 1786 - RNA, 20 nt, synthetic construct
  misc_feature 1..20: note = source = /note="Description of Artificial Sequence: Synthetic oligonucleotide"
  source 1..20: mol_type = other RNA
gaattcccagttgcctgaat

SEQ ID NO: 1787 - RNA, 20 nt, synthetic construct
  misc_feature 1..20: note = source = /note="Description of Artificial Sequence: Synthetic oligonucleotide"
  source 1..20: mol_type = other RNA
gcctgaataggcgccagagt

SEQ ID NO: 1788 - RNA, 20 nt, synthetic construct
  misc_feature 1..20: note = source = /note="Description of Artificial Sequence: Synthetic oligonucleotide"
  source 1..20: mol_type = other RNA
tggcatagctttctcagtat

SEQ ID NO: 1789 - RNA, 20 nt, synthetic construct
  misc_feature 1..20: note = source = /note="Description of Artificial Sequence: Synthetic oligonucleotide"
  source 1..20: mol_type = other RNA
ggcatagctttctcagtatt

SEQ ID NO: 1790 - RNA, 20 nt, synthetic construct
  misc_feature 1..20: note = source = /note="Description of Artificial Sequence: Synthetic oligonucleotide"
  source 1..20: mol_type = other RNA
tctcagtattgggacctgac

SEQ ID NO: 1791 - RNA, 20 nt, synthetic construct
  misc_feature 1..20: note = source = /note="Description of Artificial Sequence: Synthetic oligonucleotide"
  source 1..20: mol_type = other RNA
ctcagtattgggacctgaca

SEQ ID NO: 1792 - RNA, 20 nt, synthetic construct
  misc_feature 1..20: note = source = /note="Description of Artificial Sequence: Synthetic oligonucleotide"
  source 1..20: mol_type = other RNA
acagcacagcctctgaagat

SEQ ID NO: 1793 - RNA, 20 nt, synthetic construct
  misc_feature 1..20: note = source = /note="Description of Artificial Sequence: Synthetic oligonucleotide"
  source 1..20: mol_type = other RNA
agcctctgaagattggctca

SEQ ID NO: 1794 - RNA, 20 nt, synthetic construct
  misc_feature 1..20: note = source = /note="Description of Artificial Sequence: Synthetic oligonucleotide"
  source 1..20: mol_type = other RNA
gcctctgaagattggctcaa

SEQ ID NO: 1795 - RNA, 20 nt, synthetic construct
  misc_feature 1..20: note = source = /note="Description of Artificial Sequence: Synthetic oligonucleotide"
  source 1..20: mol_type = other RNA
cctctgaagattggctcaag

SEQ ID NO: 1796 - RNA, 20 nt, synthetic construct
  misc_feature 1..20: note = source = /note="Description of Artificial Sequence: Synthetic oligonucleotide"
  source 1..20: mol_type = other RNA
ctctgaagattggctcaagg

SEQ ID NO: 1797 - RNA, 20 nt, synthetic construct
  misc_feature 1..20: note = source = /note="Description of Artificial Sequence: Synthetic oligonucleotide"
  source 1..20: mol_type = other RNA
gctcaagggggaagagatga

SEQ ID NO: 1798 - RNA, 20 nt, synthetic construct
  misc_feature 1..20: note = source = /note="Description of Artificial Sequence: Synthetic oligonucleotide"
  source 1..20: mol_type = other RNA
tagaaatattaaatgatagc

SEQ ID NO: 1799 - RNA, 20 nt, synthetic construct
  misc_feature 1..20: note = source = /note="Description of Artificial Sequence: Synthetic oligonucleotide"
  source 1..20: mol_type = other RNA
gcatgatttaaaaagtacta

SEQ ID NO: 1800 - RNA, 20 nt, synthetic construct
  misc_feature 1..20: note = source = /note="Description of Artificial Sequence: Synthetic oligonucleotide"
  source 1..20: mol_type = other RNA
ctattttgtatcatattttc

SEQ ID NO: 1801 - RNA, 20 nt, synthetic construct
  misc_feature 1..20: note = source = /note="Description of Artificial Sequence: Synthetic oligonucleotide"
  source 1..20: mol_type = other RNA
aggaagaagagacaacattt

SEQ ID NO: 1802 - RNA, 20 nt, synthetic construct
  misc_feature 1..20: note = source = /note="Description of Artificial Sequence: Synthetic oligonucleotide"
  source 1..20: mol_type = other RNA
gcttaaagatagatgatagc

SEQ ID NO: 1803 - RNA, 20 nt, synthetic construct
  misc_feature 1..20: note = source = /note="Description of Artificial Sequence: Synthetic oligonucleotide"
  source 1..20: mol_type = other RNA
cttaaagatagatgatagcc

SEQ ID NO: 1804 - RNA, 20 nt, synthetic construct
  misc_feature 1..20: note = source = /note="Description of Artificial Sequence: Synthetic oligonucleotide"
  source 1..20: mol_type = other RNA
agatagatgatagccgggtg

SEQ ID NO: 1805 - RNA, 20 nt, synthetic construct
  misc_feature 1..20: note = source = /note="Description of Artificial Sequence: Synthetic oligonucleotide"
  source 1..20: mol_type = other RNA
tagatgatagccgggtgtgg

SEQ ID NO: 1806 - RNA, 20 nt, synthetic construct
  misc_feature 1..20: note = source = /note="Description of Artificial Sequence: Synthetic oligonucleotide"
  source 1..20: mol_type = other RNA
gacctgtaattccagcactt

SEQ ID NO: 1807 - RNA, 20 nt, synthetic construct
  misc_feature 1..20: note = source = /note="Description of Artificial Sequence: Synthetic oligonucleotide"
  source 1..20: mol_type = other RNA
acctgtaattccagcacttt

SEQ ID NO: 1808 - RNA, 20 nt, synthetic construct
  misc_feature 1..20: note = source = /note="Description of Artificial Sequence: Synthetic oligonucleotide"
  source 1..20: mol_type = other RNA
tgtaattccagcactttggg

SEQ ID NO: 1809 - RNA, 20 nt, synthetic construct
  misc_feature 1..20: note = source = /note="Description of Artificial Sequence: Synthetic oligonucleotide"
  source 1..20: mol_type = other RNA
tccagcactttgggaggccg

SEQ ID NO: 1810 - RNA, 20 nt, synthetic construct
  misc_feature 1..20: note = source = /note="Description of Artificial Sequence: Synthetic oligonucleotide"
  source 1..20: mol_type = other RNA
agcactttgggaggccgagg

SEQ ID NO: 1811 - RNA, 20 nt, synthetic construct
  misc_feature 1..20: note = source = /note="Description of Artificial Sequence: Synthetic oligonucleotide"
  source 1..20: mol_type = other RNA
gcactttgggaggccgaggc

SEQ ID NO: 1812 - RNA, 20 nt, synthetic construct
  misc_feature 1..20: note = source = /note="Description of Artificial Sequence: Synthetic oligonucleotide"
  source 1..20: mol_type = other RNA
cgaggcgggcagatcacctg

SEQ ID NO: 1813 - RNA, 20 nt, synthetic construct
  misc_feature 1..20: note = source = /note="Description of Artificial Sequence: Synthetic oligonucleotide"
  source 1..20: mol_type = other RNA
cgggcagatcacctgaggtc

SEQ ID NO: 1814 - RNA, 20 nt, synthetic construct
  misc_feature 1..20: note = source = /note="Description of Artificial Sequence: Synthetic oligonucleotide"
  source 1..20: mol_type = other RNA
tcaggagtttgaaaccaacc

SEQ ID NO: 1815 - RNA, 20 nt, synthetic construct
  misc_feature 1..20: note = source = /note="Description of Artificial Sequence: Synthetic oligonucleotide"
  source 1..20: mol_type = other RNA
aaaaaatacaaaaattagcc

SEQ ID NO: 1816 - RNA, 20 nt, synthetic construct
  misc_feature 1..20: note = source = /note="Description of Artificial Sequence: Synthetic oligonucleotide"
  source 1..20: mol_type = other RNA
atacaaaaattagccaggcg

SEQ ID NO: 1817 - RNA, 20 nt, synthetic construct
  misc_feature 1..20: note = source = /note="Description of Artificial Sequence: Synthetic oligonucleotide"
  source 1..20: mol_type = other RNA
caaaaattagccaggcgtgg

SEQ ID NO: 1818 - RNA, 20 nt, synthetic construct
  misc_feature 1..20: note = source = /note="Description of Artificial Sequence: Synthetic oligonucleotide"
  source 1..20: mol_type = other RNA
aaattagccaggcgtggtgg

SEQ ID NO: 1819 - RNA, 20 nt, synthetic construct
  misc_feature 1..20: note = source = /note="Description of Artificial Sequence: Synthetic oligonucleotide"
  source 1..20: mol_type = other RNA
aattagccaggcgtggtggt

SEQ ID NO: 1820 - RNA, 20 nt, synthetic construct
  misc_feature 1..20: note = source = /note="Description of Artificial Sequence: Synthetic oligonucleotide"
  source 1..20: mol_type = other RNA
gcctgtaattccagccactc

SEQ ID NO: 1821 - RNA, 20 nt, synthetic construct
  misc_feature 1..20: note = source = /note="Description of Artificial Sequence: Synthetic oligonucleotide"
  source 1..20: mol_type = other RNA
tccagccactcaggagactg

SEQ ID NO: 1822 - RNA, 20 nt, synthetic construct
  misc_feature 1..20: note = source = /note="Description of Artificial Sequence: Synthetic oligonucleotide"
  source 1..20: mol_type = other RNA
cacgagaatcacttgaaccc

SEQ ID NO: 1823 - RNA, 20 nt, synthetic construct
  misc_feature 1..20: note = source = /note="Description of Artificial Sequence: Synthetic oligonucleotide"
  source 1..20: mol_type = other RNA
gagaatcacttgaacccagg

SEQ ID NO: 1824 - RNA, 20 nt, synthetic construct
  misc_feature 1..20: note = source = /note="Description of Artificial Sequence: Synthetic oligonucleotide"
  source 1..20: mol_type = other RNA
cacttgaacccaggaggcag

SEQ ID NO: 1825 - RNA, 20 nt, synthetic construct
  misc_feature 1..20: note = source = /note="Description of Artificial Sequence: Synthetic oligonucleotide"
  source 1..20: mol_type = other RNA
cgtgccattgcactccagcc

SEQ ID NO: 1826 - RNA, 20 nt, synthetic construct
  misc_feature 1..20: note = source = /note="Description of Artificial Sequence: Synthetic oligonucleotide"
  source 1..20: mol_type = other RNA
gtgccattgcactccagcct

SEQ ID NO: 1827 - RNA, 20 nt, synthetic construct
  misc_feature 1..20: note = source = /note="Description of Artificial Sequence: Synthetic oligonucleotide"
  source 1..20: mol_type = other RNA
cactccagcctgggtgacag

SEQ ID NO: 1828 - RNA, 20 nt, synthetic construct
  misc_feature 1..20: note = source = /note="Description of Artificial Sequence: Synthetic oligonucleotide"
  source 1..20: mol_type = other RNA
actccagcctgggtgacaga

SEQ ID NO: 1829 - RNA, 20 nt, synthetic construct
  misc_feature 1..20: note = source = /note="Description of Artificial Sequence: Synthetic oligonucleotide"
  source 1..20: mol_type = other RNA
aaaataaaaaataattgtct

SEQ ID NO: 1830 - RNA, 20 nt, synthetic construct
  misc_feature 1..20: note = source = /note="Description of Artificial Sequence: Synthetic oligonucleotide"
  source 1..20: mol_type = other RNA
attgtcttggtgtgctaatc

SEQ ID NO: 1831 - RNA, 20 nt, synthetic construct
  misc_feature 1..20: note = source = /note="Description of Artificial Sequence: Synthetic oligonucleotide"
  source 1..20: mol_type = other RNA
tcaggagcttcctgtgagag

SEQ ID NO: 1832 - RNA, 20 nt, synthetic construct
  misc_feature 1..20: note = source = /note="Description of Artificial Sequence: Synthetic oligonucleotide"
  source 1..20: mol_type = other RNA
gagagtggaaattccttaca

SEQ ID NO: 1833 - RNA, 20 nt, synthetic construct
  misc_feature 1..20: note = source = /note="Description of Artificial Sequence: Synthetic oligonucleotide"
  source 1..20: mol_type = other RNA
tggcagtgtcatgaaatttt

SEQ ID NO: 1834 - RNA, 20 nt, synthetic construct
  misc_feature 1..20: note = source = /note="Description of Artificial Sequence: Synthetic oligonucleotide"
  source 1..20: mol_type = other RNA
gagtgtctcaaaatagttaa

SEQ ID NO: 1835 - RNA, 20 nt, synthetic construct
  misc_feature 1..20: note = source = /note="Description of Artificial Sequence: Synthetic oligonucleotide"
  source 1..20: mol_type = other RNA
ttgaagtttctttgagaact

SEQ ID NO: 1836 - RNA, 20 nt, synthetic construct
  misc_feature 1..20: note = source = /note="Description of Artificial Sequence: Synthetic oligonucleotide"
  source 1..20: mol_type = other RNA
gattattgccatgtataagt

SEQ ID NO: 1837 - RNA, 20 nt, synthetic construct
  misc_feature 1..20: note = source = /note="Description of Artificial Sequence: Synthetic oligonucleotide"
  source 1..20: mol_type = other RNA
attattgccatgtataagtt

SEQ ID NO: 1838 - RNA, 20 nt, synthetic construct
  misc_feature 1..20: note = source = /note="Description of Artificial Sequence: Synthetic oligonucleotide"
  source 1..20: mol_type = other RNA
acctttctaagtctgcattt

SEQ ID NO: 1839 - RNA, 20 nt, synthetic construct
  misc_feature 1..20: note = source = /note="Description of Artificial Sequence: Synthetic oligonucleotide"
  source 1..20: mol_type = other RNA
cctttctaagtctgcattta

SEQ ID NO: 1840 - RNA, 20 nt, synthetic construct
  misc_feature 1..20: note = source = /note="Description of Artificial Sequence: Synthetic oligonucleotide"
  source 1..20: mol_type = other RNA
cacaaaatgaaatgtttgat

SEQ ID NO: 1841 - RNA, 20 nt, synthetic construct
  misc_feature 1..20: note = source = /note="Description of Artificial Sequence: Synthetic oligonucleotide"
  source 1..20: mol_type = other RNA
agtgacttttcaaaatgtat

SEQ ID NO: 1842 - RNA, 20 nt, synthetic construct
  misc_feature 1..20: note = source = /note="Description of Artificial Sequence: Synthetic oligonucleotide"
  source 1..20: mol_type = other RNA
tttcaaaatgtataggagca

SEQ ID NO: 1843 - RNA, 20 nt, synthetic construct
  misc_feature 1..20: note = source = /note="Description of Artificial Sequence: Synthetic oligonucleotide"
  source 1..20: mol_type = other RNA
aatttataatatttatattc

SEQ ID NO: 1844 - RNA, 20 nt, synthetic construct
  misc_feature 1..20: note = source = /note="Description of Artificial Sequence: Synthetic oligonucleotide"
  source 1..20: mol_type = other RNA
cactgtaacacctagcagta

SEQ ID NO: 1845 - RNA, 20 nt, synthetic construct
  misc_feature 1..20: note = source = /note="Description of Artificial Sequence: Synthetic oligonucleotide"
  source 1..20: mol_type = other RNA
tatggttgaacatgtagaaa

SEQ ID NO: 1846 - RNA, 20 nt, synthetic construct
  misc_feature 1..20: note = source = /note="Description of Artificial Sequence: Synthetic oligonucleotide"
  source 1..20: mol_type = other RNA
ctaaaatttagcttgttcta

SEQ ID NO: 1847 - RNA, 20 nt, synthetic construct
  misc_feature 1..20: note = source = /note="Description of Artificial Sequence: Synthetic oligonucleotide"
  source 1..20: mol_type = other RNA
aggatgctactttaagcatt

SEQ ID NO: 1848 - RNA, 20 nt, synthetic construct
  misc_feature 1..20: note = source = /note="Description of Artificial Sequence: Synthetic oligonucleotide"
  source 1..20: mol_type = other RNA
ggatgctactttaagcatta

SEQ ID NO: 1849 - RNA, 20 nt, synthetic construct
  misc_feature 1..20: note = source = /note="Description of Artificial Sequence: Synthetic oligonucleotide"
  source 1..20: mol_type = other RNA
ctttaagcattagggtaaaa

SEQ ID NO: 1850 - RNA, 20 nt, synthetic construct
  misc_feature 1..20: note = source = /note="Description of Artificial Sequence: Synthetic oligonucleotide"
  source 1..20: mol_type = other RNA
atttttgtttctttcacatt

SEQ ID NO: 1851 - RNA, 20 nt, synthetic construct
  misc_feature 1..20: note = source = /note="Description of Artificial Sequence: Synthetic oligonucleotide"
  source 1..20: mol_type = other RNA
gtttcttctcatttttctcc

SEQ ID NO: 1852 - RNA, 20 nt, synthetic construct
  misc_feature 1..20: note = source = /note="Description of Artificial Sequence: Synthetic oligonucleotide"
  source 1..20: mol_type = other RNA
aaaaaaaaagaaaaaaaaac

SEQ ID NO: 1853 - RNA, 20 nt, synthetic construct
  misc_feature 1..20: note = source = /note="Description of Artificial Sequence: Synthetic oligonucleotide"
  source 1..20: mol_type = other RNA
aaaaaaaagaaaaaaaaaca

SEQ ID NO: 1854 - RNA, 20 nt, synthetic construct
  misc_feature 1..20: note = source = /note="Description of Artificial Sequence: Synthetic oligonucleotide"
  source 1..20: mol_type = other RNA
aaaaaaagaaaaaaaaacag

SEQ ID NO: 1855 - RNA, 20 nt, synthetic construct
  misc_feature 1..20: note = source = /note="Description of Artificial Sequence: Synthetic oligonucleotide"
  source 1..20: mol_type = other RNA
agtaattttctctcagagct

SEQ ID NO: 1856 - RNA, 20 nt, synthetic construct
  misc_feature 1..20: note = source = /note="Description of Artificial Sequence: Synthetic oligonucleotide"
  source 1..20: mol_type = other RNA
gtaattttctctcagagctt

SEQ ID NO: 1857 - RNA, 20 nt, synthetic construct
  misc_feature 1..20: note = source = /note="Description of Artificial Sequence: Synthetic oligonucleotide"
  source 1..20: mol_type = other RNA
tctcagagcttgggaaacat

SEQ ID NO: 1858 - RNA, 20 nt, synthetic construct
  misc_feature 1..20: note = source = /note="Description of Artificial Sequence: Synthetic oligonucleotide"
  source 1..20: mol_type = other RNA
tacgttgttacccttcatct

SEQ ID NO: 1859 - RNA, 20 nt, synthetic construct
  misc_feature 1..20: note = source = /note="Description of Artificial Sequence: Synthetic oligonucleotide"
  source 1..20: mol_type = other RNA
tccctattcatatgtttatt

SEQ ID NO: 1860 - RNA, 20 nt, synthetic construct
  misc_feature 1..20: note = source = /note="Description of Artificial Sequence: Synthetic oligonucleotide"
  source 1..20: mol_type = other RNA
ttctgaaattcctccagata

SEQ ID NO: 1861 - RNA, 20 nt, synthetic construct
  misc_feature 1..20: note = source = /note="Description of Artificial Sequence: Synthetic oligonucleotide"
  source 1..20: mol_type = other RNA
cttgatgattctgtacaatc

SEQ ID NO: 1862 - RNA, 20 nt, synthetic construct
  misc_feature 1..20: note = source = /note="Description of Artificial Sequence: Synthetic oligonucleotide"
  source 1..20: mol_type = other RNA
aactgcctttatttagctta

SEQ ID NO: 1863 - RNA, 20 nt, synthetic construct
  misc_feature 1..20: note = source = /note="Description of Artificial Sequence: Synthetic oligonucleotide"
  source 1..20: mol_type = other RNA
ctttatgaaactcatgttaa

SEQ ID NO: 1864 - RNA, 20 nt, synthetic construct
  misc_feature 1..20: note = source = /note="Description of Artificial Sequence: Synthetic oligonucleotide"
  source 1..20: mol_type = other RNA
ctctgattgattctttttaa

SEQ ID NO: 1865 - RNA, 20 nt, synthetic construct
  misc_feature 1..20: note = source = /note="Description of Artificial Sequence: Synthetic oligonucleotide"
  source 1..20: mol_type = other RNA
tttaatggtagcctatttcg

SEQ ID NO: 1866 - RNA, 20 nt, synthetic construct
  misc_feature 1..20: note = source = /note="Description of Artificial Sequence: Synthetic oligonucleotide"
  source 1..20: mol_type = other RNA
ataaaatgtattaaattttg

SEQ ID NO: 1867 - RNA, 20 nt, synthetic construct
  misc_feature 1..20: note = source = /note="Description of Artificial Sequence: Synthetic oligonucleotide"
  source 1..20: mol_type = other RNA
taaaatgtattaaattttgt

SEQ ID NO: 1868 - RNA, 20 nt, synthetic construct
  misc_feature 1..20: note = source = /note="Description of Artificial Sequence: Synthetic oligonucleotide"
  source 1..20: mol_type = other RNA
ttaaattttgtgggaaaatt

SEQ ID NO: 1869 - RNA, 20 nt, synthetic construct
  misc_feature 1..20: note = source = /note="Description of Artificial Sequence: Synthetic oligonucleotide"
  source 1..20: mol_type = other RNA
actgactaattttcagaact

SEQ ID NO: 1870 - RNA, 20 nt, synthetic construct
  misc_feature 1..20: note = source = /note="Description of Artificial Sequence: Synthetic oligonucleotide"
  source 1..20: mol_type = other RNA
ttttcagaacttggtgtgta

SEQ ID NO: 1871 - RNA, 20 nt, synthetic construct
  misc_feature 1..20: note = source = /note="Description of Artificial Sequence: Synthetic oligonucleotide"
  source 1..20: mol_type = other RNA
gctttagtattacagtgccc

SEQ ID NO: 1872 - RNA, 20 nt, synthetic construct
  misc_feature 1..20: note = source = /note="Description of Artificial Sequence: Synthetic oligonucleotide"
  source 1..20: mol_type = other RNA
gttcatcctgtacagatcta

SEQ ID NO: 1873 - RNA, 20 nt, synthetic construct
  misc_feature 1..20: note = source = /note="Description of Artificial Sequence: Synthetic oligonucleotide"
  source 1..20: mol_type = other RNA
ggtgtaactattttcatttc

SEQ ID NO: 1874 - RNA, 20 nt, synthetic construct
  misc_feature 1..20: note = source = /note="Description of Artificial Sequence: Synthetic oligonucleotide"
  source 1..20: mol_type = other RNA
gtgtaactattttcatttct

SEQ ID NO: 1875 - RNA, 20 nt, synthetic construct
  misc_feature 1..20: note = source = /note="Description of Artificial Sequence: Synthetic oligonucleotide"
  source 1..20: mol_type = other RNA
tattttcatttctgggccct

SEQ ID NO: 1876 - RNA, 20 nt, synthetic construct
  misc_feature 1..20: note = source = /note="Description of Artificial Sequence: Synthetic oligonucleotide"
  source 1..20: mol_type = other RNA
ctgggcccttggagattctt

SEQ ID NO: 1877 - RNA, 20 nt, synthetic construct
  misc_feature 1..20: note = source = /note="Description of Artificial Sequence: Synthetic oligonucleotide"
  source 1..20: mol_type = other RNA
ctatcttgctgttcaataac

SEQ ID NO: 1878 - RNA, 20 nt, synthetic construct
  misc_feature 1..20: note = source = /note="Description of Artificial Sequence: Synthetic oligonucleotide"
  source 1..20: mol_type = other RNA
tcaataacaggtaatagaaa

SEQ ID NO: 1879 - RNA, 20 nt, synthetic construct
  misc_feature 1..20: note = source = /note="Description of Artificial Sequence: Synthetic oligonucleotide"
  source 1..20: mol_type = other RNA
aaataaatgtgaaacccgta

SEQ ID NO: 1880 - RNA, 20 nt, synthetic construct
  misc_feature 1..20: note = source = /note="Description of Artificial Sequence: Synthetic oligonucleotide"
  source 1..20: mol_type = other RNA
cgtaatcttgcctagcttta

SEQ ID NO: 1881 - RNA, 20 nt, synthetic construct
  misc_feature 1..20: note = source = /note="Description of Artificial Sequence: Synthetic oligonucleotide"
  source 1..20: mol_type = other RNA
tgcctagctttaaggaatga

SEQ ID NO: 1882 - RNA, 20 nt, synthetic construct
  misc_feature 1..20: note = source = /note="Description of Artificial Sequence: Synthetic oligonucleotide"
  source 1..20: mol_type = other RNA
ctagaaacaacagagagaaa

SEQ ID NO: 1883 - RNA, 20 nt, synthetic construct
  misc_feature 1..20: note = source = /note="Description of Artificial Sequence: Synthetic oligonucleotide"
  source 1..20: mol_type = other RNA
tctacctgtaaagtatattc

SEQ ID NO: 1884 - RNA, 20 nt, synthetic construct
  misc_feature 1..20: note = source = /note="Description of Artificial Sequence: Synthetic oligonucleotide"
  source 1..20: mol_type = other RNA
aaagtgcagtttccctgtca

SEQ ID NO: 1885 - RNA, 20 nt, synthetic construct
  misc_feature 1..20: note = source = /note="Description of Artificial Sequence: Synthetic oligonucleotide"
  source 1..20: mol_type = other RNA
aagtgcagtttccctgtcat

SEQ ID NO: 1886 - RNA, 20 nt, synthetic construct
  misc_feature 1..20: note = source = /note="Description of Artificial Sequence: Synthetic oligonucleotide"
  source 1..20: mol_type = other RNA
tcccccttcttacctcaccg

SEQ ID NO: 1887 - RNA, 20 nt, synthetic construct
  misc_feature 1..20: note = source = /note="Description of Artificial Sequence: Synthetic oligonucleotide"
  source 1..20: mol_type = other RNA
cccccttcttacctcaccgt

SEQ ID NO: 1888 - RNA, 20 nt, synthetic construct
  misc_feature 1..20: note = source = /note="Description of Artificial Sequence: Synthetic oligonucleotide"
  source 1..20: mol_type = other RNA
gatcatttaaaaattaagtc

SEQ ID NO: 1889 - RNA, 20 nt, synthetic construct
  misc_feature 1..20: note = source = /note="Description of Artificial Sequence: Synthetic oligonucleotide"
  source 1..20: mol_type = other RNA
cctctgcttaaaaccattaa

SEQ ID NO: 1890 - RNA, 20 nt, synthetic construct
  misc_feature 1..20: note = source = /note="Description of Artificial Sequence: Synthetic oligonucleotide"
  source 1..20: mol_type = other RNA
ctctgcttaaaaccattaat

SEQ ID NO: 1891 - RNA, 20 nt, synthetic construct
  misc_feature 1..20: note = source = /note="Description of Artificial Sequence: Synthetic oligonucleotide"
  source 1..20: mol_type = other RNA
ccaccagtcctcaagtgaat

SEQ ID NO: 1892 - RNA, 20 nt, synthetic construct
  misc_feature 1..20: note = source = /note="Description of Artificial Sequence: Synthetic oligonucleotide"
  source 1..20: mol_type = other RNA
tcattctattctaatttcct

SEQ ID NO: 1893 - RNA, 20 nt, synthetic construct
  misc_feature 1..20: note = source = /note="Description of Artificial Sequence: Synthetic oligonucleotide"
  source 1..20: mol_type = other RNA
ccttggttttcttgctgtcc

SEQ ID NO: 1894 - RNA, 20 nt, synthetic construct
  misc_feature 1..20: note = source = /note="Description of Artificial Sequence: Synthetic oligonucleotide"
  source 1..20: mol_type = other RNA
aagagcatcctttttcctcc

SEQ ID NO: 1895 - RNA, 20 nt, synthetic construct
  misc_feature 1..20: note = source = /note="Description of Artificial Sequence: Synthetic oligonucleotide"
  source 1..20: mol_type = other RNA
cacttgctgttccctcttcc

SEQ ID NO: 1896 - RNA, 20 nt, synthetic construct
  misc_feature 1..20: note = source = /note="Description of Artificial Sequence: Synthetic oligonucleotide"
  source 1..20: mol_type = other RNA
cccttccttcagagagccac

SEQ ID NO: 1897 - RNA, 20 nt, synthetic construct
  misc_feature 1..20: note = source = /note="Description of Artificial Sequence: Synthetic oligonucleotide"
  source 1..20: mol_type = other RNA
ttttatttttttattcccat

SEQ ID NO: 1898 - RNA, 20 nt, synthetic construct
  misc_feature 1..20: note = source = /note="Description of Artificial Sequence: Synthetic oligonucleotide"
  source 1..20: mol_type = other RNA
tttttattcccataggttat

SEQ ID NO: 1899 - RNA, 20 nt, synthetic construct
  misc_feature 1..20: note = source = /note="Description of Artificial Sequence: Synthetic oligonucleotide"
  source 1..20: mol_type = other RNA
ttttattcccataggttatt

SEQ ID NO: 1900 - RNA, 20 nt, synthetic construct
  misc_feature 1..20: note = source = /note="Description of Artificial Sequence: Synthetic oligonucleotide"
  source 1..20: mol_type = other RNA
tttattcccataggttattg

SEQ ID NO: 1901 - RNA, 20 nt, synthetic construct
  misc_feature 1..20: note = source = /note="Description of Artificial Sequence: Synthetic oligonucleotide"
  source 1..20: mol_type = other RNA
cccataggttattggggaac

SEQ ID NO: 1902 - RNA, 20 nt, synthetic construct
  misc_feature 1..20: note = source = /note="Description of Artificial Sequence: Synthetic oligonucleotide"
  source 1..20: mol_type = other RNA
ataggttattggggaacagg

SEQ ID NO: 1903 - RNA, 20 nt, synthetic construct
  misc_feature 1..20: note = source = /note="Description of Artificial Sequence: Synthetic oligonucleotide"
  source 1..20: mol_type = other RNA
attggggaacaggtggtatt

SEQ ID NO: 1904 - RNA, 20 nt, synthetic construct
  misc_feature 1..20: note = source = /note="Description of Artificial Sequence: Synthetic oligonucleotide"
  source 1..20: mol_type = other RNA
acaggtggtatttggttaca

SEQ ID NO: 1905 - RNA, 20 nt, synthetic construct
  misc_feature 1..20: note = source = /note="Description of Artificial Sequence: Synthetic oligonucleotide"
  source 1..20: mol_type = other RNA
caggtggtatttggttacat

SEQ ID NO: 1906 - RNA, 20 nt, synthetic construct
  misc_feature 1..20: note = source = /note="Description of Artificial Sequence: Synthetic oligonucleotide"
  source 1..20: mol_type = other RNA
tacatgggtaagttctttag

SEQ ID NO: 1907 - RNA, 20 nt, synthetic construct
  misc_feature 1..20: note = source = /note="Description of Artificial Sequence: Synthetic oligonucleotide"
  source 1..20: mol_type = other RNA
agtggtgatttgtgagatct

SEQ ID NO: 1908 - RNA, 20 nt, synthetic construct
  misc_feature 1..20: note = source = /note="Description of Artificial Sequence: Synthetic oligonucleotide"
  source 1..20: mol_type = other RNA
gagtgagaacatatgatgtt

SEQ ID NO: 1909 - RNA, 20 nt, synthetic construct
  misc_feature 1..20: note = source = /note="Description of Artificial Sequence: Synthetic oligonucleotide"
  source 1..20: mol_type = other RNA
aatagtctccagtcttatcc

SEQ ID NO: 1910 - RNA, 20 nt, synthetic construct
  misc_feature 1..20: note = source = /note="Description of Artificial Sequence: Synthetic oligonucleotide"
  source 1..20: mol_type = other RNA
cattaattcattccttttta

SEQ ID NO: 1911 - RNA, 20 nt, synthetic construct
  misc_feature 1..20: note = source = /note="Description of Artificial Sequence: Synthetic oligonucleotide"
  source 1..20: mol_type = other RNA
ctcaccgattgacgagcatt

SEQ ID NO: 1912 - RNA, 20 nt, synthetic construct
  misc_feature 1..20: note = source = /note="Description of Artificial Sequence: Synthetic oligonucleotide"
  source 1..20: mol_type = other RNA
tcaccgattgacgagcattt

SEQ ID NO: 1913 - RNA, 20 nt, synthetic construct
  misc_feature 1..20: note = source = /note="Description of Artificial Sequence: Synthetic oligonucleotide"
  source 1..20: mol_type = other RNA
cgattgacgagcatttgggt

SEQ ID NO: 1914 - RNA, 20 nt, synthetic construct
  misc_feature 1..20: note = source = /note="Description of Artificial Sequence: Synthetic oligonucleotide"
  source 1..20: mol_type = other RNA
atataatgacttttttcctc

SEQ ID NO: 1915 - RNA, 20 nt, synthetic construct
  misc_feature 1..20: note = source = /note="Description of Artificial Sequence: Synthetic oligonucleotide"
  source 1..20: mol_type = other RNA
tataatgacttttttcctct

SEQ ID NO: 1916 - RNA, 20 nt, synthetic construct
  misc_feature 1..20: note = source = /note="Description of Artificial Sequence: Synthetic oligonucleotide"
  source 1..20: mol_type = other RNA
tctgggtagatacccagtag

SEQ ID NO: 1917 - RNA, 20 nt, synthetic construct
  misc_feature 1..20: note = source = /note="Description of Artificial Sequence: Synthetic oligonucleotide"
  source 1..20: mol_type = other RNA
ctgggtagatacccagtagt

SEQ ID NO: 1918 - RNA, 20 nt, synthetic construct
  misc_feature 1..20: note = source = /note="Description of Artificial Sequence: Synthetic oligonucleotide"
  source 1..20: mol_type = other RNA
atacccagtagtgggattgc

SEQ ID NO: 1919 - RNA, 20 nt, synthetic construct
  misc_feature 1..20: note = source = /note="Description of Artificial Sequence: Synthetic oligonucleotide"
  source 1..20: mol_type = other RNA
agtgggattgctggatcaaa

SEQ ID NO: 1920 - RNA, 20 nt, synthetic construct
  misc_feature 1..20: note = source = /note="Description of Artificial Sequence: Synthetic oligonucleotide"
  source 1..20: mol_type = other RNA
gttgtacttttagttattta

SEQ ID NO: 1921 - RNA, 20 nt, synthetic construct
  misc_feature 1..20: note = source = /note="Description of Artificial Sequence: Synthetic oligonucleotide"
  source 1..20: mol_type = other RNA
ctccacactgttttccatag

SEQ ID NO: 1922 - RNA, 20 nt, synthetic construct
  misc_feature 1..20: note = source = /note="Description of Artificial Sequence: Synthetic oligonucleotide"
  source 1..20: mol_type = other RNA
ttttttattgccgttcttgc

SEQ ID NO: 1923 - RNA, 20 nt, synthetic construct
  misc_feature 1..20: note = source = /note="Description of Artificial Sequence: Synthetic oligonucleotide"
  source 1..20: mol_type = other RNA
aggagtaaagtattgcattg

SEQ ID NO: 1924 - RNA, 20 nt, synthetic construct
  misc_feature 1..20: note = source = /note="Description of Artificial Sequence: Synthetic oligonucleotide"
  source 1..20: mol_type = other RNA
acattttctcatatgtttgt

SEQ ID NO: 1925 - RNA, 20 nt, synthetic construct
  misc_feature 1..20: note = source = /note="Description of Artificial Sequence: Synthetic oligonucleotide"
  source 1..20: mol_type = other RNA
tccttagcccactttttgat

SEQ ID NO: 1926 - RNA, 20 nt, synthetic construct
  misc_feature 1..20: note = source = /note="Description of Artificial Sequence: Synthetic oligonucleotide"
  source 1..20: mol_type = other RNA
ttttttccttgctaatttgt

SEQ ID NO: 1927 - RNA, 20 nt, synthetic construct
  misc_feature 1..20: note = source = /note="Description of Artificial Sequence: Synthetic oligonucleotide"
  source 1..20: mol_type = other RNA
tctagatattagtcctttgc

SEQ ID NO: 1928 - RNA, 20 nt, synthetic construct
  misc_feature 1..20: note = source = /note="Description of Artificial Sequence: Synthetic oligonucleotide"
  source 1..20: mol_type = other RNA
gaagattttctcccactctg

SEQ ID NO: 1929 - RNA, 20 nt, synthetic construct
  misc_feature 1..20: note = source = /note="Description of Artificial Sequence: Synthetic oligonucleotide"
  source 1..20: mol_type = other RNA
aagattttctcccactctgt

SEQ ID NO: 1930 - RNA, 20 nt, synthetic construct
  misc_feature 1..20: note = source = /note="Description of Artificial Sequence: Synthetic oligonucleotide"
  source 1..20: mol_type = other RNA
ctgttcctattgctgtgcag

SEQ ID NO: 1931 - RNA, 20 nt, synthetic construct
  misc_feature 1..20: note = source = /note="Description of Artificial Sequence: Synthetic oligonucleotide"
  source 1..20: mol_type = other RNA
gtttttgttgcatttgcttt

SEQ ID NO: 1932 - RNA, 20 nt, synthetic construct
  misc_feature 1..20: note = source = /note="Description of Artificial Sequence: Synthetic oligonucleotide"
  source 1..20: mol_type = other RNA
tttttgttgcatttgctttt

SEQ ID NO: 1933 - RNA, 20 nt, synthetic construct
  misc_feature 1..20: note = source = /note="Description of Artificial Sequence: Synthetic oligonucleotide"
  source 1..20: mol_type = other RNA
tgcatttgcttttgggttct

SEQ ID NO: 1934 - RNA, 20 nt, synthetic construct
  misc_feature 1..20: note = source = /note="Description of Artificial Sequence: Synthetic oligonucleotide"
  source 1..20: mol_type = other RNA
tacctaagccaatgtctaga

SEQ ID NO: 1935 - RNA, 20 nt, synthetic construct
  misc_feature 1..20: note = source = /note="Description of Artificial Sequence: Synthetic oligonucleotide"
  source 1..20: mol_type = other RNA
acctaagccaatgtctagaa

SEQ ID NO: 1936 - RNA, 20 nt, synthetic construct
  misc_feature 1..20: note = source = /note="Description of Artificial Sequence: Synthetic oligonucleotide"
  source 1..20: mol_type = other RNA
cttgagttgatttttatata

SEQ ID NO: 1937 - RNA, 20 nt, synthetic construct
  misc_feature 1..20: note = source = /note="Description of Artificial Sequence: Synthetic oligonucleotide"
  source 1..20: mol_type = other RNA
tttatataaggtgagagatg

SEQ ID NO: 1938 - RNA, 20 nt, synthetic construct
  misc_feature 1..20: note = source = /note="Description of Artificial Sequence: Synthetic oligonucleotide"
  source 1..20: mol_type = other RNA
tagtttcattcttctatatg

SEQ ID NO: 1939 - RNA, 20 nt, synthetic construct
  misc_feature 1..20: note = source = /note="Description of Artificial Sequence: Synthetic oligonucleotide"
  source 1..20: mol_type = other RNA
cccagcaccatttgttgaat

SEQ ID NO: 1940 - RNA, 20 nt, synthetic construct
  misc_feature 1..20: note = source = /note="Description of Artificial Sequence: Synthetic oligonucleotide"
  source 1..20: mol_type = other RNA
ccagcaccatttgttgaata

SEQ ID NO: 1941 - RNA, 20 nt, synthetic construct
  misc_feature 1..20: note = source = /note="Description of Artificial Sequence: Synthetic oligonucleotide"
  source 1..20: mol_type = other RNA
gtttttgtttgctttgtcaa

SEQ ID NO: 1942 - RNA, 20 nt, synthetic construct
  misc_feature 1..20: note = source = /note="Description of Artificial Sequence: Synthetic oligonucleotide"
  source 1..20: mol_type = other RNA
ttgctttgtcaaaggtcagt

SEQ ID NO: 1943 - RNA, 20 nt, synthetic construct
  misc_feature 1..20: note = source = /note="Description of Artificial Sequence: Synthetic oligonucleotide"
  source 1..20: mol_type = other RNA
gtcagttggctgtaagtatg

SEQ ID NO: 1944 - RNA, 20 nt, synthetic construct
  misc_feature 1..20: note = source = /note="Description of Artificial Sequence: Synthetic oligonucleotide"
  source 1..20: mol_type = other RNA
tcagttggctgtaagtatgt

SEQ ID NO: 1945 - RNA, 20 nt, synthetic construct
  misc_feature 1..20: note = source = /note="Description of Artificial Sequence: Synthetic oligonucleotide"
  source 1..20: mol_type = other RNA
aagtatgtgggtttctttct

SEQ ID NO: 1946 - RNA, 20 nt, synthetic construct
  misc_feature 1..20: note = source = /note="Description of Artificial Sequence: Synthetic oligonucleotide"
  source 1..20: mol_type = other RNA
ttggttctctatccccccat

SEQ ID NO: 1947 - RNA, 20 nt, synthetic construct
  misc_feature 1..20: note = source = /note="Description of Artificial Sequence: Synthetic oligonucleotide"
  source 1..20: mol_type = other RNA
ataccagtaccatgctgttt

SEQ ID NO: 1948 - RNA, 20 nt, synthetic construct
  misc_feature 1..20: note = source = /note="Description of Artificial Sequence: Synthetic oligonucleotide"
  source 1..20: mol_type = other RNA
ccatgctgttttggtgtcta

SEQ ID NO: 1949 - RNA, 20 nt, synthetic construct
  misc_feature 1..20: note = source = /note="Description of Artificial Sequence: Synthetic oligonucleotide"
  source 1..20: mol_type = other RNA
tggccttctagtataaagtc

SEQ ID NO: 1950 - RNA, 20 nt, synthetic construct
  misc_feature 1..20: note = source = /note="Description of Artificial Sequence: Synthetic oligonucleotide"
  source 1..20: mol_type = other RNA
ctttgtgcttagttttgctt

SEQ ID NO: 1951 - RNA, 20 nt, synthetic construct
  misc_feature 1..20: note = source = /note="Description of Artificial Sequence: Synthetic oligonucleotide"
  source 1..20: mol_type = other RNA
ttagttttgctttggctctg

SEQ ID NO: 1952 - RNA, 20 nt, synthetic construct
  misc_feature 1..20: note = source = /note="Description of Artificial Sequence: Synthetic oligonucleotide"
  source 1..20: mol_type = other RNA
tagttttgctttggctctgt

SEQ ID NO: 1953 - RNA, 20 nt, synthetic construct
  misc_feature 1..20: note = source = /note="Description of Artificial Sequence: Synthetic oligonucleotide"
  source 1..20: mol_type = other RNA
cctaattctgtgaagaatga

SEQ ID NO: 1954 - RNA, 20 nt, synthetic construct
  misc_feature 1..20: note = source = /note="Description of Artificial Sequence: Synthetic oligonucleotide"
  source 1..20: mol_type = other RNA
aattctgtgaagaatgatgg

SEQ ID NO: 1955 - RNA, 20 nt, synthetic construct
  misc_feature 1..20: note = source = /note="Description of Artificial Sequence: Synthetic oligonucleotide"
  source 1..20: mol_type = other RNA
gaatgatggtggtattttga

SEQ ID NO: 1956 - RNA, 20 nt, synthetic construct
  misc_feature 1..20: note = source = /note="Description of Artificial Sequence: Synthetic oligonucleotide"
  source 1..20: mol_type = other RNA
aatgatggtggtattttgat

SEQ ID NO: 1957 - RNA, 20 nt, synthetic construct
  misc_feature 1..20: note = source = /note="Description of Artificial Sequence: Synthetic oligonucleotide"
  source 1..20: mol_type = other RNA
ttgcatagtttatcaaccct

SEQ ID NO: 1958 - RNA, 20 nt, synthetic construct
  misc_feature 1..20: note = source = /note="Description of Artificial Sequence: Synthetic oligonucleotide"
  source 1..20: mol_type = other RNA
gatgtgagttctatgagatg

SEQ ID NO: 1959 - RNA, 20 nt, synthetic construct
  misc_feature 1..20: note = source = /note="Description of Artificial Sequence: Synthetic oligonucleotide"
  source 1..20: mol_type = other RNA
atgagatgaggaacattgtt

SEQ ID NO: 1960 - RNA, 20 nt, synthetic construct
  misc_feature 1..20: note = source = /note="Description of Artificial Sequence: Synthetic oligonucleotide"
  source 1..20: mol_type = other RNA
tgagatgaggaacattgttt

SEQ ID NO: 1961 - RNA, 20 nt, synthetic construct
  misc_feature 1..20: note = source = /note="Description of Artificial Sequence: Synthetic oligonucleotide"
  source 1..20: mol_type = other RNA
attgtcagcataccaaacag

SEQ ID NO: 1962 - RNA, 20 nt, synthetic construct
  misc_feature 1..20: note = source = /note="Description of Artificial Sequence: Synthetic oligonucleotide"
  source 1..20: mol_type = other RNA
accaaacagtggctagcaca

SEQ ID NO: 1963 - RNA, 20 nt, synthetic construct
  misc_feature 1..20: note = source = /note="Description of Artificial Sequence: Synthetic oligonucleotide"
  source 1..20: mol_type = other RNA
gtgagcactcaataaatatt

SEQ ID NO: 1964 - RNA, 20 nt, synthetic construct
  misc_feature 1..20: note = source = /note="Description of Artificial Sequence: Synthetic oligonucleotide"
  source 1..20: mol_type = other RNA
aaagttgcagtgaatgaaaa

SEQ ID NO: 1965 - RNA, 20 nt, synthetic construct
  misc_feature 1..20: note = source = /note="Description of Artificial Sequence: Synthetic oligonucleotide"
  source 1..20: mol_type = other RNA
aatgaaaatggtttctaaaa

SEQ ID NO: 1966 - RNA, 20 nt, synthetic construct
  misc_feature 1..20: note = source = /note="Description of Artificial Sequence: Synthetic oligonucleotide"
  source 1..20: mol_type = other RNA
tatagtcccagctactctga

SEQ ID NO: 1967 - RNA, 20 nt, synthetic construct
  misc_feature 1..20: note = source = /note="Description of Artificial Sequence: Synthetic oligonucleotide"
  source 1..20: mol_type = other RNA
cccagctactctgaaggctg

SEQ ID NO: 1968 - RNA, 20 nt, synthetic construct
  misc_feature 1..20: note = source = /note="Description of Artificial Sequence: Synthetic oligonucleotide"
  source 1..20: mol_type = other RNA
gctactctgaaggctgaggc

SEQ ID NO: 1969 - RNA, 20 nt, synthetic construct
  misc_feature 1..20: note = source = /note="Description of Artificial Sequence: Synthetic oligonucleotide"
  source 1..20: mol_type = other RNA
ttgcctgagtctcaaaagtt

SEQ ID NO: 1970 - RNA, 20 nt, synthetic construct
  misc_feature 1..20: note = source = /note="Description of Artificial Sequence: Synthetic oligonucleotide"
  source 1..20: mol_type = other RNA
tgcctgagtctcaaaagttt

SEQ ID NO: 1971 - RNA, 20 nt, synthetic construct
  misc_feature 1..20: note = source = /note="Description of Artificial Sequence: Synthetic oligonucleotide"
  source 1..20: mol_type = other RNA
gcctgagtctcaaaagtttg

SEQ ID NO: 1972 - RNA, 20 nt, synthetic construct
  misc_feature 1..20: note = source = /note="Description of Artificial Sequence: Synthetic oligonucleotide"
  source 1..20: mol_type = other RNA
atagctgctgcattgtagcc

SEQ ID NO: 1973 - RNA, 20 nt, synthetic construct
  misc_feature 1..20: note = source = /note="Description of Artificial Sequence: Synthetic oligonucleotide"
  source 1..20: mol_type = other RNA
aacccatctctttaaaaaaa

SEQ ID NO: 1974 - RNA, 20 nt, synthetic construct
  misc_feature 1..20: note = source = /note="Description of Artificial Sequence: Synthetic oligonucleotide"
  source 1..20: mol_type = other RNA
ttttactgcttttctcttta

SEQ ID NO: 1975 - RNA, 20 nt, synthetic construct
  misc_feature 1..20: note = source = /note="Description of Artificial Sequence: Synthetic oligonucleotide"
  source 1..20: mol_type = other RNA
ctctgctgatttatcctcat

SEQ ID NO: 1976 - RNA, 20 nt, synthetic construct
  misc_feature 1..20: note = source = /note="Description of Artificial Sequence: Synthetic oligonucleotide"
  source 1..20: mol_type = other RNA
aatatccattgattatttat

SEQ ID NO: 1977 - RNA, 20 nt, synthetic construct
  misc_feature 1..20: note = source = /note="Description of Artificial Sequence: Synthetic oligonucleotide"
  source 1..20: mol_type = other RNA
gattatttataggtgaaatt

SEQ ID NO: 1978 - RNA, 20 nt, synthetic construct
  misc_feature 1..20: note = source = /note="Description of Artificial Sequence: Synthetic oligonucleotide"
  source 1..20: mol_type = other RNA
tataggtgaaattaggcttt

SEQ ID NO: 1979 - RNA, 20 nt, synthetic construct
  misc_feature 1..20: note = source = /note="Description of Artificial Sequence: Synthetic oligonucleotide"
  source 1..20: mol_type = other RNA
attaggcttttggatccatg

SEQ ID NO: 1980 - RNA, 20 nt, synthetic construct
  misc_feature 1..20: note = source = /note="Description of Artificial Sequence: Synthetic oligonucleotide"
  source 1..20: mol_type = other RNA
aatagctgagacaatcttcc

SEQ ID NO: 1981 - RNA, 20 nt, synthetic construct
  misc_feature 1..20: note = source = /note="Description of Artificial Sequence: Synthetic oligonucleotide"
  source 1..20: mol_type = other RNA
gacaatcttccaggagcttc

SEQ ID NO: 1982 - RNA, 20 nt, synthetic construct
  misc_feature 1..20: note = source = /note="Description of Artificial Sequence: Synthetic oligonucleotide"
  source 1..20: mol_type = other RNA
tccaggagcttctggagccg

SEQ ID NO: 1983 - RNA, 20 nt, synthetic construct
  misc_feature 1..20: note = source = /note="Description of Artificial Sequence: Synthetic oligonucleotide"
  source 1..20: mol_type = other RNA
ttctggagccgaggaaacat

SEQ ID NO: 1984 - RNA, 20 nt, synthetic construct
  misc_feature 1..20: note = source = /note="Description of Artificial Sequence: Synthetic oligonucleotide"
  source 1..20: mol_type = other RNA
cactaaaataccatttatat

SEQ ID NO: 1985 - RNA, 20 nt, synthetic construct
  misc_feature 1..20: note = source = /note="Description of Artificial Sequence: Synthetic oligonucleotide"
  source 1..20: mol_type = other RNA
aattacattgtgcatttaaa

SEQ ID NO: 1986 - RNA, 20 nt, synthetic construct
  misc_feature 1..20: note = source = /note="Description of Artificial Sequence: Synthetic oligonucleotide"
  source 1..20: mol_type = other RNA
gtgcatttaaaaggctgttg

SEQ ID NO: 1987 - RNA, 20 nt, synthetic construct
  misc_feature 1..20: note = source = /note="Description of Artificial Sequence: Synthetic oligonucleotide"
  source 1..20: mol_type = other RNA
actgatttataaatagactt

SEQ ID NO: 1988 - RNA, 20 nt, synthetic construct
  misc_feature 1..20: note = source = /note="Description of Artificial Sequence: Synthetic oligonucleotide"
  source 1..20: mol_type = other RNA
ctgatttataaatagactta

SEQ ID NO: 1989 - RNA, 20 nt, synthetic construct
  misc_feature 1..20: note = source = /note="Description of Artificial Sequence: Synthetic oligonucleotide"
  source 1..20: mol_type = other RNA
cttcctcctccttctacact

SEQ ID NO: 1990 - RNA, 20 nt, synthetic construct
  misc_feature 1..20: note = source = /note="Description of Artificial Sequence: Synthetic oligonucleotide"
  source 1..20: mol_type = other RNA
tgatgagaaaatatcttttc

SEQ ID NO: 1991 - RNA, 20 nt, synthetic construct
  misc_feature 1..20: note = source = /note="Description of Artificial Sequence: Synthetic oligonucleotide"
  source 1..20: mol_type = other RNA
cttcattctttttttttaaa

SEQ ID NO: 1992 - RNA, 20 nt, synthetic construct
  misc_feature 1..20: note = source = /note="Description of Artificial Sequence: Synthetic oligonucleotide"
  source 1..20: mol_type = other RNA
cattctttttttttaaatgg

SEQ ID NO: 1993 - RNA, 20 nt, synthetic construct
  misc_feature 1..20: note = source = /note="Description of Artificial Sequence: Synthetic oligonucleotide"
  source 1..20: mol_type = other RNA
tttcttcctgctgttattgc

SEQ ID NO: 1994 - RNA, 20 nt, synthetic construct
  misc_feature 1..20: note = source = /note="Description of Artificial Sequence: Synthetic oligonucleotide"
  source 1..20: mol_type = other RNA
ttattgctggctcaaaatcc

SEQ ID NO: 1995 - RNA, 20 nt, synthetic construct
  misc_feature 1..20: note = source = /note="Description of Artificial Sequence: Synthetic oligonucleotide"
  source 1..20: mol_type = other RNA
gttatttctgagctccatga

SEQ ID NO: 1996 - RNA, 20 nt, synthetic construct
  misc_feature 1..20: note = source = /note="Description of Artificial Sequence: Synthetic oligonucleotide"
  source 1..20: mol_type = other RNA
ttatttctgagctccatgat

SEQ ID NO: 1997 - RNA, 20 nt, synthetic construct
  misc_feature 1..20: note = source = /note="Description of Artificial Sequence: Synthetic oligonucleotide"
  source 1..20: mol_type = other RNA
ccagtgtctagcacagtgcc

SEQ ID NO: 1998 - RNA, 20 nt, synthetic construct
  misc_feature 1..20: note = source = /note="Description of Artificial Sequence: Synthetic oligonucleotide"
  source 1..20: mol_type = other RNA
agcctataatgtttatctag

SEQ ID NO: 1999 - RNA, 20 nt, synthetic construct
  misc_feature 1..20: note = source = /note="Description of Artificial Sequence: Synthetic oligonucleotide"
  source 1..20: mol_type = other RNA
ttatcattgcaaagatttag

SEQ ID NO: 2000 - RNA, 20 nt, synthetic construct
  misc_feature 1..20: note = source = /note="Description of Artificial Sequence: Synthetic oligonucleotide"
  source 1..20: mol_type = other RNA
taatgctctactccatgcta

SEQ ID NO: 2001 - RNA, 20 nt, synthetic construct
  misc_feature 1..20: note = source = /note="Description of Artificial Sequence: Synthetic oligonucleotide"
  source 1..20: mol_type = other RNA
ataaccaaataagataacac

SEQ ID NO: 2002 - RNA, 20 nt, synthetic construct
  misc_feature 1..20: note = source = /note="Description of Artificial Sequence: Synthetic oligonucleotide"
  source 1..20: mol_type = other RNA
tttgttctttaaaaaatgac

SEQ ID NO: 2003 - RNA, 20 nt, synthetic construct
  misc_feature 1..20: note = source = /note="Description of Artificial Sequence: Synthetic oligonucleotide"
  source 1..20: mol_type = other RNA
agaataagagaaaaaattag

SEQ ID NO: 2004 - RNA, 20 nt, synthetic construct
  misc_feature 1..20: note = source = /note="Description of Artificial Sequence: Synthetic oligonucleotide"
  source 1..20: mol_type = other RNA
ctacaactgcctcttgataa

SEQ ID NO: 2005 - RNA, 20 nt, synthetic construct
  misc_feature 1..20: note = source = /note="Description of Artificial Sequence: Synthetic oligonucleotide"
  source 1..20: mol_type = other RNA
tgcctcttgataaaggatgc

SEQ ID NO: 2006 - RNA, 20 nt, synthetic construct
  misc_feature 1..20: note = source = /note="Description of Artificial Sequence: Synthetic oligonucleotide"
  source 1..20: mol_type = other RNA
taatgtttgctcatttacag

SEQ ID NO: 2007 - RNA, 20 nt, synthetic construct
  misc_feature 1..20: note = source = /note="Description of Artificial Sequence: Synthetic oligonucleotide"
  source 1..20: mol_type = other RNA
ggaatgtacaatatagtacc

SEQ ID NO: 2008 - RNA, 20 nt, synthetic construct
  misc_feature 1..20: note = source = /note="Description of Artificial Sequence: Synthetic oligonucleotide"
  source 1..20: mol_type = other RNA
gaatgtacaatatagtacct

SEQ ID NO: 2009 - RNA, 20 nt, synthetic construct
  misc_feature 1..20: note = source = /note="Description of Artificial Sequence: Synthetic oligonucleotide"
  source 1..20: mol_type = other RNA
gtacaatatagtacctggga

SEQ ID NO: 2010 - RNA, 20 nt, synthetic construct
  misc_feature 1..20: note = source = /note="Description of Artificial Sequence: Synthetic oligonucleotide"
  source 1..20: mol_type = other RNA
agtacctgggatggtgaaga

SEQ ID NO: 2011 - RNA, 20 nt, synthetic construct
  misc_feature 1..20: note = source = /note="Description of Artificial Sequence: Synthetic oligonucleotide"
  source 1..20: mol_type = other RNA
caacaaatttaaaatagctg

SEQ ID NO: 2012 - RNA, 20 nt, synthetic construct
  misc_feature 1..20: note = source = /note="Description of Artificial Sequence: Synthetic oligonucleotide"
  source 1..20: mol_type = other RNA
aacaaatttaaaatagctgt

SEQ ID NO: 2013 - RNA, 20 nt, synthetic construct
  misc_feature 1..20: note = source = /note="Description of Artificial Sequence: Synthetic oligonucleotide"
  source 1..20: mol_type = other RNA
atgcctgcctttatctgctt

SEQ ID NO: 2014 - RNA, 20 nt, synthetic construct
  misc_feature 1..20: note = source = /note="Description of Artificial Sequence: Synthetic oligonucleotide"
  source 1..20: mol_type = other RNA
atagcatgcatttctcagac

SEQ ID NO: 2015 - RNA, 20 nt, synthetic construct
  misc_feature 1..20: note = source = /note="Description of Artificial Sequence: Synthetic oligonucleotide"
  source 1..20: mol_type = other RNA
tcagacaggtaagatagaat

SEQ ID NO: 2016 - RNA, 20 nt, synthetic construct
  misc_feature 1..20: note = source = /note="Description of Artificial Sequence: Synthetic oligonucleotide"
  source 1..20: mol_type = other RNA
agatagaattggtatatatt

SEQ ID NO: 2017 - RNA, 20 nt, synthetic construct
  misc_feature 1..20: note = source = /note="Description of Artificial Sequence: Synthetic oligonucleotide"
  source 1..20: mol_type = other RNA
tttggtatagcaaaaagtca

SEQ ID NO: 2018 - RNA, 20 nt, synthetic construct
  misc_feature 1..20: note = source = /note="Description of Artificial Sequence: Synthetic oligonucleotide"
  source 1..20: mol_type = other RNA
ttgtctttagattatatcct

SEQ ID NO: 2019 - RNA, 20 nt, synthetic construct
  misc_feature 1..20: note = source = /note="Description of Artificial Sequence: Synthetic oligonucleotide"
  source 1..20: mol_type = other RNA
tatatccttggtttttcatg

SEQ ID NO: 2020 - RNA, 20 nt, synthetic construct
  misc_feature 1..20: note = source = /note="Description of Artificial Sequence: Synthetic oligonucleotide"
  source 1..20: mol_type = other RNA
cttggtttttcatgtggtac

SEQ ID NO: 2021 - RNA, 20 nt, synthetic construct
  misc_feature 1..20: note = source = /note="Description of Artificial Sequence: Synthetic oligonucleotide"
  source 1..20: mol_type = other RNA
ttggtttttcatgtggtact

SEQ ID NO: 2022 - RNA, 20 nt, synthetic construct
  misc_feature 1..20: note = source = /note="Description of Artificial Sequence: Synthetic oligonucleotide"
  source 1..20: mol_type = other RNA
tggtttttcatgtggtactg

SEQ ID NO: 2023 - RNA, 20 nt, synthetic construct
  misc_feature 1..20: note = source = /note="Description of Artificial Sequence: Synthetic oligonucleotide"
  source 1..20: mol_type = other RNA
tttcttcatctataaaatga

SEQ ID NO: 2024 - RNA, 20 nt, synthetic construct
  misc_feature 1..20: note = source = /note="Description of Artificial Sequence: Synthetic oligonucleotide"
  source 1..20: mol_type = other RNA
catctataaaatgaaggacc

SEQ ID NO: 2025 - RNA, 20 nt, synthetic construct
  misc_feature 1..20: note = source = /note="Description of Artificial Sequence: Synthetic oligonucleotide"
  source 1..20: mol_type = other RNA
atctataaaatgaaggacct

SEQ ID NO: 2026 - RNA, 20 nt, synthetic construct
  misc_feature 1..20: note = source = /note="Description of Artificial Sequence: Synthetic oligonucleotide"
  source 1..20: mol_type = other RNA
aactttgagctcagcaaagt

SEQ ID NO: 2027 - RNA, 20 nt, synthetic construct
  misc_feature 1..20: note = source = /note="Description of Artificial Sequence: Synthetic oligonucleotide"
  source 1..20: mol_type = other RNA
actttgagctcagcaaagta

SEQ ID NO: 2028 - RNA, 20 nt, synthetic construct
  misc_feature 1..20: note = source = /note="Description of Artificial Sequence: Synthetic oligonucleotide"
  source 1..20: mol_type = other RNA
cagttgacccttgaataaca

SEQ ID NO: 2029 - RNA, 20 nt, synthetic construct
  misc_feature 1..20: note = source = /note="Description of Artificial Sequence: Synthetic oligonucleotide"
  source 1..20: mol_type = other RNA
ttgacccttgaataacatgg

SEQ ID NO: 2030 - RNA, 20 nt, synthetic construct
  misc_feature 1..20: note = source = /note="Description of Artificial Sequence: Synthetic oligonucleotide"
  source 1..20: mol_type = other RNA
actaatagcctgctgttgtc

SEQ ID NO: 2031 - RNA, 20 nt, synthetic construct
  misc_feature 1..20: note = source = /note="Description of Artificial Sequence: Synthetic oligonucleotide"
  source 1..20: mol_type = other RNA
aatagcctgctgttgtctgg

SEQ ID NO: 2032 - RNA, 20 nt, synthetic construct
  misc_feature 1..20: note = source = /note="Description of Artificial Sequence: Synthetic oligonucleotide"
  source 1..20: mol_type = other RNA
ctgttattaagaaaatcgta

SEQ ID NO: 2033 - RNA, 20 nt, synthetic construct
  misc_feature 1..20: note = source = /note="Description of Artificial Sequence: Synthetic oligonucleotide"
  source 1..20: mol_type = other RNA
tatatttactatttattaaa

SEQ ID NO: 2034 - RNA, 20 nt, synthetic construct
  misc_feature 1..20: note = source = /note="Description of Artificial Sequence: Synthetic oligonucleotide"
  source 1..20: mol_type = other RNA
ccttgagtatgctgaagaag

SEQ ID NO: 2035 - RNA, 20 nt, synthetic construct
  misc_feature 1..20: note = source = /note="Description of Artificial Sequence: Synthetic oligonucleotide"
  source 1..20: mol_type = other RNA
tgagtatgctgaagaagagg

SEQ ID NO: 2036 - RNA, 20 nt, synthetic construct
  misc_feature 1..20: note = source = /note="Description of Artificial Sequence: Synthetic oligonucleotide"
  source 1..20: mol_type = other RNA
tgctgaagaagaggaggaaa

SEQ ID NO: 2037 - RNA, 20 nt, synthetic construct
  misc_feature 1..20: note = source = /note="Description of Artificial Sequence: Synthetic oligonucleotide"
  source 1..20: mol_type = other RNA
gaagaagaggaggaaaagga

SEQ ID NO: 2038 - RNA, 20 nt, synthetic construct
  misc_feature 1..20: note = source = /note="Description of Artificial Sequence: Synthetic oligonucleotide"
  source 1..20: mol_type = other RNA
aagaagaggaggaaaaggat

SEQ ID NO: 2039 - RNA, 20 nt, synthetic construct
  misc_feature 1..20: note = source = /note="Description of Artificial Sequence: Synthetic oligonucleotide"
  source 1..20: mol_type = other RNA
agaggaggaaaaggatgggt

SEQ ID NO: 2040 - RNA, 20 nt, synthetic construct
  misc_feature 1..20: note = source = /note="Description of Artificial Sequence: Synthetic oligonucleotide"
  source 1..20: mol_type = other RNA
tgggttggtcttgctgttcc

SEQ ID NO: 2041 - RNA, 20 nt, synthetic construct
  misc_feature 1..20: note = source = /note="Description of Artificial Sequence: Synthetic oligonucleotide"
  source 1..20: mol_type = other RNA
gggttggtcttgctgttcca

SEQ ID NO: 2042 - RNA, 20 nt, synthetic construct
  misc_feature 1..20: note = source = /note="Description of Artificial Sequence: Synthetic oligonucleotide"
  source 1..20: mol_type = other RNA
ggttggtcttgctgttccag

SEQ ID NO: 2043 - RNA, 20 nt, synthetic construct
  misc_feature 1..20: note = source = /note="Description of Artificial Sequence: Synthetic oligonucleotide"
  source 1..20: mol_type = other RNA
tggtcttgctgttccagggg

SEQ ID NO: 2044 - RNA, 20 nt, synthetic construct
  misc_feature 1..20: note = source = /note="Description of Artificial Sequence: Synthetic oligonucleotide"
  source 1..20: mol_type = other RNA
tgttccaggggtggcagaag

SEQ ID NO: 2045 - RNA, 20 nt, synthetic construct
  misc_feature 1..20: note = source = /note="Description of Artificial Sequence: Synthetic oligonucleotide"
  source 1..20: mol_type = other RNA
cagttcaaacctgtatttta

SEQ ID NO: 2046 - RNA, 20 nt, synthetic construct
  misc_feature 1..20: note = source = /note="Description of Artificial Sequence: Synthetic oligonucleotide"
  source 1..20: mol_type = other RNA
aacctgtattttaaggtcaa

SEQ ID NO: 2047 - RNA, 20 nt, synthetic construct
  misc_feature 1..20: note = source = /note="Description of Artificial Sequence: Synthetic oligonucleotide"
  source 1..20: mol_type = other RNA
aactatgaaagttgaattca

SEQ ID NO: 2048 - RNA, 20 nt, synthetic construct
  misc_feature 1..20: note = source = /note="Description of Artificial Sequence: Synthetic oligonucleotide"
  source 1..20: mol_type = other RNA
tcatataatgagaatactaa

SEQ ID NO: 2049 - RNA, 20 nt, synthetic construct
  misc_feature 1..20: note = source = /note="Description of Artificial Sequence: Synthetic oligonucleotide"
  source 1..20: mol_type = other RNA
aaaaagaaaatctttcagtg

SEQ ID NO: 2050 - RNA, 20 nt, synthetic construct
  misc_feature 1..20: note = source = /note="Description of Artificial Sequence: Synthetic oligonucleotide"
  source 1..20: mol_type = other RNA
tctagtagatgacatatttt

SEQ ID NO: 2051 - RNA, 20 nt, synthetic construct
  misc_feature 1..20: note = source = /note="Description of Artificial Sequence: Synthetic oligonucleotide"
  source 1..20: mol_type = other RNA
ttttggtaatgaaattgata

SEQ ID NO: 2052 - RNA, 20 nt, synthetic construct
  misc_feature 1..20: note = source = /note="Description of Artificial Sequence: Synthetic oligonucleotide"
  source 1..20: mol_type = other RNA
tttggtaatgaaattgatat

SEQ ID NO: 2053 - RNA, 20 nt, synthetic construct
  misc_feature 1..20: note = source = /note="Description of Artificial Sequence: Synthetic oligonucleotide"
  source 1..20: mol_type = other RNA
attaacagctttttccaagt

SEQ ID NO: 2054 - RNA, 20 nt, synthetic construct
  misc_feature 1..20: note = source = /note="Description of Artificial Sequence: Synthetic oligonucleotide"
  source 1..20: mol_type = other RNA
atataaattttcttcttaag

SEQ ID NO: 2055 - RNA, 20 nt, synthetic construct
  misc_feature 1..20: note = source = /note="Description of Artificial Sequence: Synthetic oligonucleotide"
  source 1..20: mol_type = other RNA
attcttgcatgccaacacaa

SEQ ID NO: 2056 - RNA, 20 nt, synthetic construct
  misc_feature 1..20: note = source = /note="Description of Artificial Sequence: Synthetic oligonucleotide"
  source 1..20: mol_type = other RNA
acctatccttagtttctaag

SEQ ID NO: 2057 - RNA, 20 nt, synthetic construct
  misc_feature 1..20: note = source = /note="Description of Artificial Sequence: Synthetic oligonucleotide"
  source 1..20: mol_type = other RNA
gataagttccaactcaatct

SEQ ID NO: 2058 - RNA, 20 nt, synthetic construct
  misc_feature 1..20: note = source = /note="Description of Artificial Sequence: Synthetic oligonucleotide"
  source 1..20: mol_type = other RNA
agttccaactcaatcttggt

SEQ ID NO: 2059 - RNA, 20 nt, synthetic construct
  misc_feature 1..20: note = source = /note="Description of Artificial Sequence: Synthetic oligonucleotide"
  source 1..20: mol_type = other RNA
gttccaactcaatcttggtt

SEQ ID NO: 2060 - RNA, 20 nt, synthetic construct
  misc_feature 1..20: note = source = /note="Description of Artificial Sequence: Synthetic oligonucleotide"
  source 1..20: mol_type = other RNA
aactcaatcttggttgggtg

SEQ ID NO: 2061 - RNA, 20 nt, synthetic construct
  misc_feature 1..20: note = source = /note="Description of Artificial Sequence: Synthetic oligonucleotide"
  source 1..20: mol_type = other RNA
tcaatcttggttgggtgtgg

SEQ ID NO: 2062 - RNA, 20 nt, synthetic construct
  misc_feature 1..20: note = source = /note="Description of Artificial Sequence: Synthetic oligonucleotide"
  source 1..20: mol_type = other RNA
gtggctcacgcctgtgatcc

SEQ ID NO: 2063 - RNA, 20 nt, synthetic construct
  misc_feature 1..20: note = source = /note="Description of Artificial Sequence: Synthetic oligonucleotide"
  source 1..20: mol_type = other RNA
cgcctgtgatcccggcactt

SEQ ID NO: 2064 - RNA, 20 nt, synthetic construct
  misc_feature 1..20: note = source = /note="Description of Artificial Sequence: Synthetic oligonucleotide"
  source 1..20: mol_type = other RNA
gcctgtgatcccggcacttt

SEQ ID NO: 2065 - RNA, 20 nt, synthetic construct
  misc_feature 1..20: note = source = /note="Description of Artificial Sequence: Synthetic oligonucleotide"
  source 1..20: mol_type = other RNA
tgtgatcccggcactttggg

SEQ ID NO: 2066 - RNA, 20 nt, synthetic construct
  misc_feature 1..20: note = source = /note="Description of Artificial Sequence: Synthetic oligonucleotide"
  source 1..20: mol_type = other RNA
cccggcactttgggaggccg

SEQ ID NO: 2067 - RNA, 20 nt, synthetic construct
  misc_feature 1..20: note = source = /note="Description of Artificial Sequence: Synthetic oligonucleotide"
  source 1..20: mol_type = other RNA
ggcactttgggaggccgagg

SEQ ID NO: 2068 - RNA, 20 nt, synthetic construct
  misc_feature 1..20: note = source = /note="Description of Artificial Sequence: Synthetic oligonucleotide"
  source 1..20: mol_type = other RNA
gcactttgggaggccgaggt

SEQ ID NO: 2069 - RNA, 20 nt, synthetic construct
  misc_feature 1..20: note = source = /note="Description of Artificial Sequence: Synthetic oligonucleotide"
  source 1..20: mol_type = other RNA
ggtgggcagatcacgagctc

SEQ ID NO: 2070 - RNA, 20 nt, synthetic construct
  misc_feature 1..20: note = source = /note="Description of Artificial Sequence: Synthetic oligonucleotide"
  source 1..20: mol_type = other RNA
tcaggagtttgagaccagcc

SEQ ID NO: 2071 - RNA, 20 nt, synthetic construct
  misc_feature 1..20: note = source = /note="Description of Artificial Sequence: Synthetic oligonucleotide"
  source 1..20: mol_type = other RNA
tgagaccagcctggccaata

SEQ ID NO: 2072 - RNA, 20 nt, synthetic construct
  misc_feature 1..20: note = source = /note="Description of Artificial Sequence: Synthetic oligonucleotide"
  source 1..20: mol_type = other RNA
aaaaaaaaacaaaactagcc

SEQ ID NO: 2073 - RNA, 20 nt, synthetic construct
  misc_feature 1..20: note = source = /note="Description of Artificial Sequence: Synthetic oligonucleotide"
  source 1..20: mol_type = other RNA
aaaacaaaactagcccggca

SEQ ID NO: 2074 - RNA, 20 nt, synthetic construct
  misc_feature 1..20: note = source = /note="Description of Artificial Sequence: Synthetic oligonucleotide"
  source 1..20: mol_type = other RNA
acaaaactagcccggcatgg

SEQ ID NO: 2075 - RNA, 20 nt, synthetic construct
  misc_feature 1..20: note = source = /note="Description of Artificial Sequence: Synthetic oligonucleotide"
  source 1..20: mol_type = other RNA
ctcccgtagtcccagctact

SEQ ID NO: 2076 - RNA, 20 nt, synthetic construct
  misc_feature 1..20: note = source = /note="Description of Artificial Sequence: Synthetic oligonucleotide"
  source 1..20: mol_type = other RNA
tcccgtagtcccagctactt

SEQ ID NO: 2077 - RNA, 20 nt, synthetic construct
  misc_feature 1..20: note = source = /note="Description of Artificial Sequence: Synthetic oligonucleotide"
  source 1..20: mol_type = other RNA
cgtagtcccagctacttggg

SEQ ID NO: 2078 - RNA, 20 nt, synthetic construct
  misc_feature 1..20: note = source = /note="Description of Artificial Sequence: Synthetic oligonucleotide"
  source 1..20: mol_type = other RNA
cccagctacttgggaggctg

SEQ ID NO: 2079 - RNA, 20 nt, synthetic construct
  misc_feature 1..20: note = source = /note="Description of Artificial Sequence: Synthetic oligonucleotide"
  source 1..20: mol_type = other RNA
gctacttgggaggctgaggc

SEQ ID NO: 2080 - RNA, 20 nt, synthetic construct
  misc_feature 1..20: note = source = /note="Description of Artificial Sequence: Synthetic oligonucleotide"
  source 1..20: mol_type = other RNA
caggagaatcgattgaaccc

SEQ ID NO: 2081 - RNA, 20 nt, synthetic construct
  misc_feature 1..20: note = source = /note="Description of Artificial Sequence: Synthetic oligonucleotide"
  source 1..20: mol_type = other RNA
gagaatcgattgaacccagg

SEQ ID NO: 2082 - RNA, 20 nt, synthetic construct
  misc_feature 1..20: note = source = /note="Description of Artificial Sequence: Synthetic oligonucleotide"
  source 1..20: mol_type = other RNA
aatcgattgaacccaggagg

SEQ ID NO: 2083 - RNA, 20 nt, synthetic construct
  misc_feature 1..20: note = source = /note="Description of Artificial Sequence: Synthetic oligonucleotide"
  source 1..20: mol_type = other RNA
cgattgaacccaggaggtgg

SEQ ID NO: 2084 - RNA, 20 nt, synthetic construct
  misc_feature 1..20: note = source = /note="Description of Artificial Sequence: Synthetic oligonucleotide"
  source 1..20: mol_type = other RNA
tgcaccactgcactccagcc

SEQ ID NO: 2085 - RNA, 20 nt, synthetic construct
  misc_feature 1..20: note = source = /note="Description of Artificial Sequence: Synthetic oligonucleotide"
  source 1..20: mol_type = other RNA
gcaccactgcactccagcct

SEQ ID NO: 2086 - RNA, 20 nt, synthetic construct
  misc_feature 1..20: note = source = /note="Description of Artificial Sequence: Synthetic oligonucleotide"
  source 1..20: mol_type = other RNA
cactccagcctgggcaaaag

SEQ ID NO: 2087 - RNA, 20 nt, synthetic construct
  misc_feature 1..20: note = source = /note="Description of Artificial Sequence: Synthetic oligonucleotide"
  source 1..20: mol_type = other RNA
actccagcctgggcaaaaga

SEQ ID NO: 2088 - RNA, 20 nt, synthetic construct
  misc_feature 1..20: note = source = /note="Description of Artificial Sequence: Synthetic oligonucleotide"
  source 1..20: mol_type = other RNA
tgagtcattttagtcaataa

SEQ ID NO: 2089 - RNA, 20 nt, synthetic construct
  misc_feature 1..20: note = source = /note="Description of Artificial Sequence: Synthetic oligonucleotide"
  source 1..20: mol_type = other RNA
aatttgctacaagaatgcaa

SEQ ID NO: 2090 - RNA, 20 nt, synthetic construct
  misc_feature 1..20: note = source = /note="Description of Artificial Sequence: Synthetic oligonucleotide"
  source 1..20: mol_type = other RNA
aatgcaaaggtgatgacatg

SEQ ID NO: 2091 - RNA, 20 nt, synthetic construct
  misc_feature 1..20: note = source = /note="Description of Artificial Sequence: Synthetic oligonucleotide"
  source 1..20: mol_type = other RNA
ggtgatgacatgaggaaaaa

SEQ ID NO: 2092 - RNA, 20 nt, synthetic construct
  misc_feature 1..20: note = source = /note="Description of Artificial Sequence: Synthetic oligonucleotide"
  source 1..20: mol_type = other RNA
gtgatgacatgaggaaaaaa

SEQ ID NO: 2093 - RNA, 20 nt, synthetic construct
  misc_feature 1..20: note = source = /note="Description of Artificial Sequence: Synthetic oligonucleotide"
  source 1..20: mol_type = other RNA
tgatgacatgaggaaaaaag

SEQ ID NO: 2094 - RNA, 20 nt, synthetic construct
  misc_feature 1..20: note = source = /note="Description of Artificial Sequence: Synthetic oligonucleotide"
  source 1..20: mol_type = other RNA
ctctactactcagcaaatgc

SEQ ID NO: 2095 - RNA, 20 nt, synthetic construct
  misc_feature 1..20: note = source = /note="Description of Artificial Sequence: Synthetic oligonucleotide"
  source 1..20: mol_type = other RNA
ctactcagcaaatgcaggcc

SEQ ID NO: 2096 - RNA, 20 nt, synthetic construct
  misc_feature 1..20: note = source = /note="Description of Artificial Sequence: Synthetic oligonucleotide"
  source 1..20: mol_type = other RNA
ttattcaaatatttattaca

SEQ ID NO: 2097 - RNA, 20 nt, synthetic construct
  misc_feature 1..20: note = source = /note="Description of Artificial Sequence: Synthetic oligonucleotide"
  source 1..20: mol_type = other RNA
attaaaacatttataaaatt

SEQ ID NO: 2098 - RNA, 20 nt, synthetic construct
  misc_feature 1..20: note = source = /note="Description of Artificial Sequence: Synthetic oligonucleotide"
  source 1..20: mol_type = other RNA
taaacaagattataatctaa

SEQ ID NO: 2099 - RNA, 20 nt, synthetic construct
  misc_feature 1..20: note = source = /note="Description of Artificial Sequence: Synthetic oligonucleotide"
  source 1..20: mol_type = other RNA
aatctaatggagattaatat

SEQ ID NO: 2100 - RNA, 20 nt, synthetic construct
  misc_feature 1..20: note = source = /note="Description of Artificial Sequence: Synthetic oligonucleotide"
  source 1..20: mol_type = other RNA
gtttaataaaatattgactt

SEQ ID NO: 2101 - RNA, 20 nt, synthetic construct
  misc_feature 1..20: note = source = /note="Description of Artificial Sequence: Synthetic oligonucleotide"
  source 1..20: mol_type = other RNA
gacttaggtagatatatgtg

SEQ ID NO: 2102 - RNA, 20 nt, synthetic construct
  misc_feature 1..20: note = source = /note="Description of Artificial Sequence: Synthetic oligonucleotide"
  source 1..20: mol_type = other RNA
tatgtatttcttaaaagagt

SEQ ID NO: 2103 - RNA, 20 nt, synthetic construct
  misc_feature 1..20: note = source = /note="Description of Artificial Sequence: Synthetic oligonucleotide"
  source 1..20: mol_type = other RNA
gtaggtagcaatgacttcaa

SEQ ID NO: 2104 - RNA, 20 nt, synthetic construct
  misc_feature 1..20: note = source = /note="Description of Artificial Sequence: Synthetic oligonucleotide"
  source 1..20: mol_type = other RNA
tcatatataagtaaaatttt

SEQ ID NO: 2105 - RNA, 20 nt, synthetic construct
  misc_feature 1..20: note = source = /note="Description of Artificial Sequence: Synthetic oligonucleotide"
  source 1..20: mol_type = other RNA
catatataagtaaaatttta

SEQ ID NO: 2106 - RNA, 20 nt, synthetic construct
  misc_feature 1..20: note = source = /note="Description of Artificial Sequence: Synthetic oligonucleotide"
  source 1..20: mol_type = other RNA
atatataagtaaaattttag

SEQ ID NO: 2107 - RNA, 20 nt, synthetic construct
  misc_feature 1..20: note = source = /note="Description of Artificial Sequence: Synthetic oligonucleotide"
  source 1..20: mol_type = other RNA
agtatttcctaagatttatt

SEQ ID NO: 2108 - RNA, 20 nt, synthetic construct
  misc_feature 1..20: note = source = /note="Description of Artificial Sequence: Synthetic oligonucleotide"
  source 1..20: mol_type = other RNA
atagaagatcgatatttttc

SEQ ID NO: 2109 - RNA, 20 nt, synthetic construct
  misc_feature 1..20: note = source = /note="Description of Artificial Sequence: Synthetic oligonucleotide"
  source 1..20: mol_type = other RNA
tagaagatcgatatttttct

SEQ ID NO: 2110 - RNA, 20 nt, synthetic construct
  misc_feature 1..20: note = source = /note="Description of Artificial Sequence: Synthetic oligonucleotide"
  source 1..20: mol_type = other RNA
tatttttctgggatgacata

SEQ ID NO: 2111 - RNA, 20 nt, synthetic construct
  misc_feature 1..20: note = source = /note="Description of Artificial Sequence: Synthetic oligonucleotide"
  source 1..20: mol_type = other RNA
aagtaaaaagctgaatgaat

SEQ ID NO: 2112 - RNA, 20 nt, synthetic construct
  misc_feature 1..20: note = source = /note="Description of Artificial Sequence: Synthetic oligonucleotide"
  source 1..20: mol_type = other RNA
tgtcagaaaaatgagattat

SEQ ID NO: 2113 - RNA, 20 nt, synthetic construct
  misc_feature 1..20: note = source = /note="Description of Artificial Sequence: Synthetic oligonucleotide"
  source 1..20: mol_type = other RNA
gtcagaaaaatgagattata

SEQ ID NO: 2114 - RNA, 20 nt, synthetic construct
  misc_feature 1..20: note = source = /note="Description of Artificial Sequence: Synthetic oligonucleotide"
  source 1..20: mol_type = other RNA
caaatattagagaagcagac

SEQ ID NO: 2115 - RNA, 20 nt, synthetic construct
  misc_feature 1..20: note = source = /note="Description of Artificial Sequence: Synthetic oligonucleotide"
  source 1..20: mol_type = other RNA
tagaaagaatcacaacttag

SEQ ID NO: 2116 - RNA, 20 nt, synthetic construct
  misc_feature 1..20: note = source = /note="Description of Artificial Sequence: Synthetic oligonucleotide"
  source 1..20: mol_type = other RNA
agaaagaatcacaacttagt

SEQ ID NO: 2117 - RNA, 20 nt, synthetic construct
  misc_feature 1..20: note = source = /note="Description of Artificial Sequence: Synthetic oligonucleotide"
  source 1..20: mol_type = other RNA
gaaagaatcacaacttagtg

SEQ ID NO: 2118 - RNA, 20 nt, synthetic construct
  misc_feature 1..20: note = source = /note="Description of Artificial Sequence: Synthetic oligonucleotide"
  source 1..20: mol_type = other RNA
tagtggggcaaaaacctaca

SEQ ID NO: 2119 - RNA, 20 nt, synthetic construct
  misc_feature 1..20: note = source = /note="Description of Artificial Sequence: Synthetic oligonucleotide"
  source 1..20: mol_type = other RNA
acctacaaggaaaatttttg

SEQ ID NO: 2120 - RNA, 20 nt, synthetic construct
  misc_feature 1..20: note = source = /note="Description of Artificial Sequence: Synthetic oligonucleotide"
  source 1..20: mol_type = other RNA
cctacaaggaaaatttttgt

SEQ ID NO: 2121 - RNA, 20 nt, synthetic construct
  misc_feature 1..20: note = source = /note="Description of Artificial Sequence: Synthetic oligonucleotide"
  source 1..20: mol_type = other RNA
aggaaaatttttgtgggaac

SEQ ID NO: 2122 - RNA, 20 nt, synthetic construct
  misc_feature 1..20: note = source = /note="Description of Artificial Sequence: Synthetic oligonucleotide"
  source 1..20: mol_type = other RNA
tttttgtgggaaccggtgcc

SEQ ID NO: 2123 - RNA, 20 nt, synthetic construct
  misc_feature 1..20: note = source = /note="Description of Artificial Sequence: Synthetic oligonucleotide"
  source 1..20: mol_type = other RNA
tgtgggaaccggtgccaggt

SEQ ID NO: 2124 - RNA, 20 nt, synthetic construct
  misc_feature 1..20: note = source = /note="Description of Artificial Sequence: Synthetic oligonucleotide"
  source 1..20: mol_type = other RNA
aattgaaaaattgttcagtg

SEQ ID NO: 2125 - RNA, 20 nt, synthetic construct
  misc_feature 1..20: note = source = /note="Description of Artificial Sequence: Synthetic oligonucleotide"
  source 1..20: mol_type = other RNA
attgaaaaattgttcagtgt

SEQ ID NO: 2126 - RNA, 20 nt, synthetic construct
  misc_feature 1..20: note = source = /note="Description of Artificial Sequence: Synthetic oligonucleotide"
  source 1..20: mol_type = other RNA
gaaaaattgttcagtgtggg

SEQ ID NO: 2127 - RNA, 20 nt, synthetic construct
  misc_feature 1..20: note = source = /note="Description of Artificial Sequence: Synthetic oligonucleotide"
  source 1..20: mol_type = other RNA
gtgtgggcggttgttcagtg

SEQ ID NO: 2128 - RNA, 20 nt, synthetic construct
  misc_feature 1..20: note = source = /note="Description of Artificial Sequence: Synthetic oligonucleotide"
  source 1..20: mol_type = other RNA
tgttcagtgtggcaagtctg

SEQ ID NO: 2129 - RNA, 20 nt, synthetic construct
  misc_feature 1..20: note = source = /note="Description of Artificial Sequence: Synthetic oligonucleotide"
  source 1..20: mol_type = other RNA
gttcagtgtggcaagtctga

SEQ ID NO: 2130 - RNA, 20 nt, synthetic construct
  misc_feature 1..20: note = source = /note="Description of Artificial Sequence: Synthetic oligonucleotide"
  source 1..20: mol_type = other RNA
gtctgagggttaaaaactcc

SEQ ID NO: 2131 - RNA, 20 nt, synthetic construct
  misc_feature 1..20: note = source = /note="Description of Artificial Sequence: Synthetic oligonucleotide"
  source 1..20: mol_type = other RNA
tgagggttaaaaactccagg

SEQ ID NO: 2132 - RNA, 20 nt, synthetic construct
  misc_feature 1..20: note = source = /note="Description of Artificial Sequence: Synthetic oligonucleotide"
  source 1..20: mol_type = other RNA
actccaggaggactcactta

SEQ ID NO: 2133 - RNA, 20 nt, synthetic construct
  misc_feature 1..20: note = source = /note="Description of Artificial Sequence: Synthetic oligonucleotide"
  source 1..20: mol_type = other RNA
caggaggactcacttacgga

SEQ ID NO: 2134 - RNA, 20 nt, synthetic construct
  misc_feature 1..20: note = source = /note="Description of Artificial Sequence: Synthetic oligonucleotide"
  source 1..20: mol_type = other RNA
aggaggactcacttacggaa

SEQ ID NO: 2135 - RNA, 20 nt, synthetic construct
  misc_feature 1..20: note = source = /note="Description of Artificial Sequence: Synthetic oligonucleotide"
  source 1..20: mol_type = other RNA
cttttgtgagtttaacctcc

SEQ ID NO: 2136 - RNA, 20 nt, synthetic construct
  misc_feature 1..20: note = source = /note="Description of Artificial Sequence: Synthetic oligonucleotide"
  source 1..20: mol_type = other RNA
ggagtgttcacagtgactac

SEQ ID NO: 2137 - RNA, 20 nt, synthetic construct
  misc_feature 1..20: note = source = /note="Description of Artificial Sequence: Synthetic oligonucleotide"
  source 1..20: mol_type = other RNA
ctactggagaaaattcccta

SEQ ID NO: 2138 - RNA, 20 nt, synthetic construct
  misc_feature 1..20: note = source = /note="Description of Artificial Sequence: Synthetic oligonucleotide"
  source 1..20: mol_type = other RNA
tactggagaaaattccctaa

SEQ ID NO: 2139 - RNA, 20 nt, synthetic construct
  misc_feature 1..20: note = source = /note="Description of Artificial Sequence: Synthetic oligonucleotide"
  source 1..20: mol_type = other RNA
actggagaaaattccctaag

SEQ ID NO: 2140 - RNA, 20 nt, synthetic construct
  misc_feature 1..20: note = source = /note="Description of Artificial Sequence: Synthetic oligonucleotide"
  source 1..20: mol_type = other RNA
ttccctaaggggagaagaaa

SEQ ID NO: 2141 - RNA, 20 nt, synthetic construct
  misc_feature 1..20: note = source = /note="Description of Artificial Sequence: Synthetic oligonucleotide"
  source 1..20: mol_type = other RNA
aatatgtcagagcattttgt

SEQ ID NO: 2142 - RNA, 20 nt, synthetic construct
  misc_feature 1..20: note = source = /note="Description of Artificial Sequence: Synthetic oligonucleotide"
  source 1..20: mol_type = other RNA
tttaccagagcctaaacttt

SEQ ID NO: 2143 - RNA, 20 nt, synthetic construct
  misc_feature 1..20: note = source = /note="Description of Artificial Sequence: Synthetic oligonucleotide"
  source 1..20: mol_type = other RNA
ttaccagagcctaaactttt

SEQ ID NO: 2144 - RNA, 20 nt, synthetic construct
  misc_feature 1..20: note = source = /note="Description of Artificial Sequence: Synthetic oligonucleotide"
  source 1..20: mol_type = other RNA
ataagagtgtaacctcccaa

SEQ ID NO: 2145 - RNA, 20 nt, synthetic construct
  misc_feature 1..20: note = source = /note="Description of Artificial Sequence: Synthetic oligonucleotide"
  source 1..20: mol_type = other RNA
taagagtgtaacctcccaaa

SEQ ID NO: 2146 - RNA, 20 nt, synthetic construct
  misc_feature 1..20: note = source = /note="Description of Artificial Sequence: Synthetic oligonucleotide"
  source 1..20: mol_type = other RNA
agtgtaacctcccaaaggga

SEQ ID NO: 2147 - RNA, 20 nt, synthetic construct
  misc_feature 1..20: note = source = /note="Description of Artificial Sequence: Synthetic oligonucleotide"
  source 1..20: mol_type = other RNA
gtgtaacctcccaaagggaa

SEQ ID NO: 2148 - RNA, 20 nt, synthetic construct
  misc_feature 1..20: note = source = /note="Description of Artificial Sequence: Synthetic oligonucleotide"
  source 1..20: mol_type = other RNA
ccccttttagctttccacat

SEQ ID NO: 2149 - RNA, 20 nt, synthetic construct
  misc_feature 1..20: note = source = /note="Description of Artificial Sequence: Synthetic oligonucleotide"
  source 1..20: mol_type = other RNA
cccttttagctttccacata

SEQ ID NO: 2150 - RNA, 20 nt, synthetic construct
  misc_feature 1..20: note = source = /note="Description of Artificial Sequence: Synthetic oligonucleotide"
  source 1..20: mol_type = other RNA
ttagctttccacatagggaa

SEQ ID NO: 2151 - RNA, 20 nt, synthetic construct
  misc_feature 1..20: note = source = /note="Description of Artificial Sequence: Synthetic oligonucleotide"
  source 1..20: mol_type = other RNA
gaaaggaaaatatataactc

SEQ ID NO: 2152 - RNA, 20 nt, synthetic construct
  misc_feature 1..20: note = source = /note="Description of Artificial Sequence: Synthetic oligonucleotide"
  source 1..20: mol_type = other RNA
caaaccatcctgtccacgtt

SEQ ID NO: 2153 - RNA, 20 nt, synthetic construct
  misc_feature 1..20: note = source = /note="Description of Artificial Sequence: Synthetic oligonucleotide"
  source 1..20: mol_type = other RNA
aaaccatcctgtccacgtta

SEQ ID NO: 2154 - RNA, 20 nt, synthetic construct
  misc_feature 1..20: note = source = /note="Description of Artificial Sequence: Synthetic oligonucleotide"
  source 1..20: mol_type = other RNA
aaccatcctgtccacgttag

SEQ ID NO: 2155 - RNA, 20 nt, synthetic construct
  misc_feature 1..20: note = source = /note="Description of Artificial Sequence: Synthetic oligonucleotide"
  source 1..20: mol_type = other RNA
accatcctgtccacgttagg

SEQ ID NO: 2156 - RNA, 20 nt, synthetic construct
  misc_feature 1..20: note = source = /note="Description of Artificial Sequence: Synthetic oligonucleotide"
  source 1..20: mol_type = other RNA
ctgtccacgttagggggcct

SEQ ID NO: 2157 - RNA, 20 nt, synthetic construct
  misc_feature 1..20: note = source = /note="Description of Artificial Sequence: Synthetic oligonucleotide"
  source 1..20: mol_type = other RNA
tgtccacgttagggggccta

SEQ ID NO: 2158 - RNA, 20 nt, synthetic construct
  misc_feature 1..20: note = source = /note="Description of Artificial Sequence: Synthetic oligonucleotide"
  source 1..20: mol_type = other RNA
gtccacgttagggggcctag

SEQ ID NO: 2159 - RNA, 20 nt, synthetic construct
  misc_feature 1..20: note = source = /note="Description of Artificial Sequence: Synthetic oligonucleotide"
  source 1..20: mol_type = other RNA
cctaggggaactgagaaaac

SEQ ID NO: 2160 - RNA, 20 nt, synthetic construct
  misc_feature 1..20: note = source = /note="Description of Artificial Sequence: Synthetic oligonucleotide"
  source 1..20: mol_type = other RNA
ctggtgaagttcatagtcca

SEQ ID NO: 2161 - RNA, 20 nt, synthetic construct
  misc_feature 1..20: note = source = /note="Description of Artificial Sequence: Synthetic oligonucleotide"
  source 1..20: mol_type = other RNA
tggtgaagttcatagtccat

SEQ ID NO: 2162 - RNA, 20 nt, synthetic construct
  misc_feature 1..20: note = source = /note="Description of Artificial Sequence: Synthetic oligonucleotide"
  source 1..20: mol_type = other RNA
tgggtacagtttcaccaaag

SEQ ID NO: 2163 - RNA, 20 nt, synthetic construct
  misc_feature 1..20: note = source = /note="Description of Artificial Sequence: Synthetic oligonucleotide"
  source 1..20: mol_type = other RNA
gggtacagtttcaccaaaga

SEQ ID NO: 2164 - RNA, 20 nt, synthetic construct
  misc_feature 1..20: note = source = /note="Description of Artificial Sequence: Synthetic oligonucleotide"
  source 1..20: mol_type = other RNA
aagagggagaccaaattata

SEQ ID NO: 2165 - RNA, 20 nt, synthetic construct
  misc_feature 1..20: note = source = /note="Description of Artificial Sequence: Synthetic oligonucleotide"
  source 1..20: mol_type = other RNA
cattcaaccaaaaaattata

SEQ ID NO: 2166 - RNA, 20 nt, synthetic construct
  misc_feature 1..20: note = source = /note="Description of Artificial Sequence: Synthetic oligonucleotide"
  source 1..20: mol_type = other RNA
aaattataaggcatgctaaa

SEQ ID NO: 2167 - RNA, 20 nt, synthetic construct
  misc_feature 1..20: note = source = /note="Description of Artificial Sequence: Synthetic oligonucleotide"
  source 1..20: mol_type = other RNA
tataaggcatgctaaaaggc

SEQ ID NO: 2168 - RNA, 20 nt, synthetic construct
  misc_feature 1..20: note = source = /note="Description of Artificial Sequence: Synthetic oligonucleotide"
  source 1..20: mol_type = other RNA
atcagaagcagagtcaaata

SEQ ID NO: 2169 - RNA, 20 nt, synthetic construct
  misc_feature 1..20: note = source = /note="Description of Artificial Sequence: Synthetic oligonucleotide"
  source 1..20: mol_type = other RNA
gtcaaatatggcagtgacat

SEQ ID NO: 2170 - RNA, 20 nt, synthetic construct
  misc_feature 1..20: note = source = /note="Description of Artificial Sequence: Synthetic oligonucleotide"
  source 1..20: mol_type = other RNA
agaaactttataaaaaacta

SEQ ID NO: 2171 - RNA, 20 nt, synthetic construct
  misc_feature 1..20: note = source = /note="Description of Artificial Sequence: Synthetic oligonucleotide"
  source 1..20: mol_type = other RNA
ataaaaaactatggttaata

SEQ ID NO: 2172 - RNA, 20 nt, synthetic construct
  misc_feature 1..20: note = source = /note="Description of Artificial Sequence: Synthetic oligonucleotide"
  source 1..20: mol_type = other RNA
aaactatggttaatatggtg

SEQ ID NO: 2173 - RNA, 20 nt, synthetic construct
  misc_feature 1..20: note = source = /note="Description of Artificial Sequence: Synthetic oligonucleotide"
  source 1..20: mol_type = other RNA
aactatggttaatatggtga

SEQ ID NO: 2174 - RNA, 20 nt, synthetic construct
  misc_feature 1..20: note = source = /note="Description of Artificial Sequence: Synthetic oligonucleotide"
  source 1..20: mol_type = other RNA
aaatgacatacaagaacaga

SEQ ID NO: 2175 - RNA, 20 nt, synthetic construct
  misc_feature 1..20: note = source = /note="Description of Artificial Sequence: Synthetic oligonucleotide"
  source 1..20: mol_type = other RNA
ggataatgtaaatatagaga

SEQ ID NO: 2176 - RNA, 20 nt, synthetic construct
  misc_feature 1..20: note = source = /note="Description of Artificial Sequence: Synthetic oligonucleotide"
  source 1..20: mol_type = other RNA
aatatagagacggaaatttt

SEQ ID NO: 2177 - RNA, 20 nt, synthetic construct
  misc_feature 1..20: note = source = /note="Description of Artificial Sequence: Synthetic oligonucleotide"
  source 1..20: mol_type = other RNA
atgattaaaatgtctttgat

SEQ ID NO: 2178 - RNA, 20 nt, synthetic construct
  misc_feature 1..20: note = source = /note="Description of Artificial Sequence: Synthetic oligonucleotide"
  source 1..20: mol_type = other RNA
aagtagattgaacatagccg

SEQ ID NO: 2179 - RNA, 20 nt, synthetic construct
  misc_feature 1..20: note = source = /note="Description of Artificial Sequence: Synthetic oligonucleotide"
  source 1..20: mol_type = other RNA
ggaaaaaatctttgaagtta

SEQ ID NO: 2180 - RNA, 20 nt, synthetic construct
  misc_feature 1..20: note = source = /note="Description of Artificial Sequence: Synthetic oligonucleotide"
  source 1..20: mol_type = other RNA
gaagttaaggatatgataat

SEQ ID NO: 2181 - RNA, 20 nt, synthetic construct
  misc_feature 1..20: note = source = /note="Description of Artificial Sequence: Synthetic oligonucleotide"
  source 1..20: mol_type = other RNA
agagattattcaagaactgc

SEQ ID NO: 2182 - RNA, 20 nt, synthetic construct
  misc_feature 1..20: note = source = /note="Description of Artificial Sequence: Synthetic oligonucleotide"
  source 1..20: mol_type = other RNA
aactgcaggagaactacaaa

SEQ ID NO: 2183 - RNA, 20 nt, synthetic construct
  misc_feature 1..20: note = source = /note="Description of Artificial Sequence: Synthetic oligonucleotide"
  source 1..20: mol_type = other RNA
aaggtataatgtacgtgcaa

SEQ ID NO: 2184 - RNA, 20 nt, synthetic construct
  misc_feature 1..20: note = source = /note="Description of Artificial Sequence: Synthetic oligonucleotide"
  source 1..20: mol_type = other RNA
aggtataatgtacgtgcaat

SEQ ID NO: 2185 - RNA, 20 nt, synthetic construct
  misc_feature 1..20: note = source = /note="Description of Artificial Sequence: Synthetic oligonucleotide"
  source 1..20: mol_type = other RNA
catactagaaaaagaaagaa

SEQ ID NO: 2186 - RNA, 20 nt, synthetic construct
  misc_feature 1..20: note = source = /note="Description of Artificial Sequence: Synthetic oligonucleotide"
  source 1..20: mol_type = other RNA
gagctcaaagaacaccaagc

SEQ ID NO: 2187 - RNA, 20 nt, synthetic construct
  misc_feature 1..20: note = source = /note="Description of Artificial Sequence: Synthetic oligonucleotide"
  source 1..20: mol_type = other RNA
aaatgtcccaaaactactca

SEQ ID NO: 2188 - RNA, 20 nt, synthetic construct
  misc_feature 1..20: note = source = /note="Description of Artificial Sequence: Synthetic oligonucleotide"
  source 1..20: mol_type = other RNA
aatgtcccaaaactactcat

SEQ ID NO: 2189 - RNA, 20 nt, synthetic construct
  misc_feature 1..20: note = source = /note="Description of Artificial Sequence: Synthetic oligonucleotide"
  source 1..20: mol_type = other RNA
aaatatcgaaagaatccaga

SEQ ID NO: 2190 - RNA, 20 nt, synthetic construct
  misc_feature 1..20: note = source = /note="Description of Artificial Sequence: Synthetic oligonucleotide"
  source 1..20: mol_type = other RNA
gaaggaaaaaacacctatag

SEQ ID NO: 2191 - RNA, 20 nt, synthetic construct
  misc_feature 1..20: note = source = /note="Description of Artificial Sequence: Synthetic oligonucleotide"
  source 1..20: mol_type = other RNA
aagatgttgaaagaaaaatc

SEQ ID NO: 2192 - RNA, 20 nt, synthetic construct
  misc_feature 1..20: note = source = /note="Description of Artificial Sequence: Synthetic oligonucleotide"
  source 1..20: mol_type = other RNA
aatccggcagtgtacgattc

SEQ ID NO: 2193 - RNA, 20 nt, synthetic construct
  misc_feature 1..20: note = source = /note="Description of Artificial Sequence: Synthetic oligonucleotide"
  source 1..20: mol_type = other RNA
cttaaagaaacaaaaatttc

SEQ ID NO: 2194 - RNA, 20 nt, synthetic construct
  misc_feature 1..20: note = source = /note="Description of Artificial Sequence: Synthetic oligonucleotide"
  source 1..20: mol_type = other RNA
tttcaggaatttgttgccag

SEQ ID NO: 2195 - RNA, 20 nt, synthetic construct
  misc_feature 1..20: note = source = /note="Description of Artificial Sequence: Synthetic oligonucleotide"
  source 1..20: mol_type = other RNA
gtttaaagttctttagagag

SEQ ID NO: 2196 - RNA, 20 nt, synthetic construct
  misc_feature 1..20: note = source = /note="Description of Artificial Sequence: Synthetic oligonucleotide"
  source 1..20: mol_type = other RNA
agagagaggtaaaatgatac

SEQ ID NO: 2197 - RNA, 20 nt, synthetic construct
  misc_feature 1..20: note = source = /note="Description of Artificial Sequence: Synthetic oligonucleotide"
  source 1..20: mol_type = other RNA
tagaaactcagatccacata

SEQ ID NO: 2198 - RNA, 20 nt, synthetic construct
  misc_feature 1..20: note = source = /note="Description of Artificial Sequence: Synthetic oligonucleotide"
  source 1..20: mol_type = other RNA
cacataaggaaaataaaatt

SEQ ID NO: 2199 - RNA, 20 nt, synthetic construct
  misc_feature 1..20: note = source = /note="Description of Artificial Sequence: Synthetic oligonucleotide"
  source 1..20: mol_type = other RNA
acataaggaaaataaaatta

SEQ ID NO: 2200 - RNA, 20 nt, synthetic construct
  misc_feature 1..20: note = source = /note="Description of Artificial Sequence: Synthetic oligonucleotide"
  source 1..20: mol_type = other RNA
taagatcaagaacaagacaa

SEQ ID NO: 2201 - RNA, 20 nt, synthetic construct
  misc_feature 1..20: note = source = /note="Description of Artificial Sequence: Synthetic oligonucleotide"
  source 1..20: mol_type = other RNA
cttaccactttgtttcctac

SEQ ID NO: 2202 - RNA, 20 nt, synthetic construct
  misc_feature 1..20: note = source = /note="Description of Artificial Sequence: Synthetic oligonucleotide"
  source 1..20: mol_type = other RNA
tacctaatgcaataagacaa

SEQ ID NO: 2203 - RNA, 20 nt, synthetic construct
  misc_feature 1..20: note = source = /note="Description of Artificial Sequence: Synthetic oligonucleotide"
  source 1..20: mol_type = other RNA
aatgaaaagcatacagattc

SEQ ID NO: 2204 - RNA, 20 nt, synthetic construct
  misc_feature 1..20: note = source = /note="Description of Artificial Sequence: Synthetic oligonucleotide"
  source 1..20: mol_type = other RNA
gaaaagcatacagattccgg

SEQ ID NO: 2205 - RNA, 20 nt, synthetic construct
  misc_feature 1..20: note = source = /note="Description of Artificial Sequence: Synthetic oligonucleotide"
  source 1..20: mol_type = other RNA
aatcaaactgtctttgttca

SEQ ID NO: 2206 - RNA, 20 nt, synthetic construct
  misc_feature 1..20: note = source = /note="Description of Artificial Sequence: Synthetic oligonucleotide"
  source 1..20: mol_type = other RNA
acggatgacagttgtttata

SEQ ID NO: 2207 - RNA, 20 nt, synthetic construct
  misc_feature 1..20: note = source = /note="Description of Artificial Sequence: Synthetic oligonucleotide"
  source 1..20: mol_type = other RNA
tgtttatatggaatatccaa

SEQ ID NO: 2208 - RNA, 20 nt, synthetic construct
  misc_feature 1..20: note = source = /note="Description of Artificial Sequence: Synthetic oligonucleotide"
  source 1..20: mol_type = other RNA
aggatcagaaaaaagaaaac

SEQ ID NO: 2209 - RNA, 20 nt, synthetic construct
  misc_feature 1..20: note = source = /note="Description of Artificial Sequence: Synthetic oligonucleotide"
  source 1..20: mol_type = other RNA
actaataaatgattattgta

SEQ ID NO: 2210 - RNA, 20 nt, synthetic construct
  misc_feature 1..20: note = source = /note="Description of Artificial Sequence: Synthetic oligonucleotide"
  source 1..20: mol_type = other RNA
aaacacagcacgatatttta

SEQ ID NO: 2211 - RNA, 20 nt, synthetic construct
  misc_feature 1..20: note = source = /note="Description of Artificial Sequence: Synthetic oligonucleotide"
  source 1..20: mol_type = other RNA
attttatggatatcaacaaa

SEQ ID NO: 2212 - RNA, 20 nt, synthetic construct
  misc_feature 1..20: note = source = /note="Description of Artificial Sequence: Synthetic oligonucleotide"
  source 1..20: mol_type = other RNA
aaaggattctaaagtttata

SEQ ID NO: 2213 - RNA, 20 nt, synthetic construct
  misc_feature 1..20: note = source = /note="Description of Artificial Sequence: Synthetic oligonucleotide"
  source 1..20: mol_type = other RNA
attctaaagtttatatggag

SEQ ID NO: 2214 - RNA, 20 nt, synthetic construct
  misc_feature 1..20: note = source = /note="Description of Artificial Sequence: Synthetic oligonucleotide"
  source 1..20: mol_type = other RNA
aatagccaactcagtatttg

SEQ ID NO: 2215 - RNA, 20 nt, synthetic construct
  misc_feature 1..20: note = source = /note="Description of Artificial Sequence: Synthetic oligonucleotide"
  source 1..20: mol_type = other RNA
gaggagaacaacaaagtcag

SEQ ID NO: 2216 - RNA, 20 nt, synthetic construct
  misc_feature 1..20: note = source = /note="Description of Artificial Sequence: Synthetic oligonucleotide"
  source 1..20: mol_type = other RNA
gtcagaggactgacactacc

SEQ ID NO: 2217 - RNA, 20 nt, synthetic construct
  misc_feature 1..20: note = source = /note="Description of Artificial Sequence: Synthetic oligonucleotide"
  source 1..20: mol_type = other RNA
agctcagataatcaatgtag

SEQ ID NO: 2218 - RNA, 20 nt, synthetic construct
  misc_feature 1..20: note = source = /note="Description of Artificial Sequence: Synthetic oligonucleotide"
  source 1..20: mol_type = other RNA
gctcagataatcaatgtagt

SEQ ID NO: 2219 - RNA, 20 nt, synthetic construct
  misc_feature 1..20: note = source = /note="Description of Artificial Sequence: Synthetic oligonucleotide"
  source 1..20: mol_type = other RNA
ataatcaatgtagtgggtac

SEQ ID NO: 2220 - RNA, 20 nt, synthetic construct
  misc_feature 1..20: note = source = /note="Description of Artificial Sequence: Synthetic oligonucleotide"
  source 1..20: mol_type = other RNA
agaatattcaaatagaccaa

SEQ ID NO: 2221 - RNA, 20 nt, synthetic construct
  misc_feature 1..20: note = source = /note="Description of Artificial Sequence: Synthetic oligonucleotide"
  source 1..20: mol_type = other RNA
taatcaaatgatctttgaca

SEQ ID NO: 2222 - RNA, 20 nt, synthetic construct
  misc_feature 1..20: note = source = /note="Description of Artificial Sequence: Synthetic oligonucleotide"
  source 1..20: mol_type = other RNA
aatcaaatgatctttgacaa

SEQ ID NO: 2223 - RNA, 20 nt, synthetic construct
  misc_feature 1..20: note = source = /note="Description of Artificial Sequence: Synthetic oligonucleotide"
  source 1..20: mol_type = other RNA
gatctttgacaagggagcaa

SEQ ID NO: 2224 - RNA, 20 nt, synthetic construct
  misc_feature 1..20: note = source = /note="Description of Artificial Sequence: Synthetic oligonucleotide"
  source 1..20: mol_type = other RNA
agggagcaaaggcaatacaa

SEQ ID NO: 2225 - RNA, 20 nt, synthetic construct
  misc_feature 1..20: note = source = /note="Description of Artificial Sequence: Synthetic oligonucleotide"
  source 1..20: mol_type = other RNA
gcaatacaatggagcaaaga

SEQ ID NO: 2226 - RNA, 20 nt, synthetic construct
  misc_feature 1..20: note = source = /note="Description of Artificial Sequence: Synthetic oligonucleotide"
  source 1..20: mol_type = other RNA
gtcttttcaacaaataatgc

SEQ ID NO: 2227 - RNA, 20 nt, synthetic construct
  misc_feature 1..20: note = source = /note="Description of Artificial Sequence: Synthetic oligonucleotide"
  source 1..20: mol_type = other RNA
aaactcccagaagataacac

SEQ ID NO: 2228 - RNA, 20 nt, synthetic construct
  misc_feature 1..20: note = source = /note="Description of Artificial Sequence: Synthetic oligonucleotide"
  source 1..20: mol_type = other RNA
ggaaaaatcctagatgactt

SEQ ID NO: 2229 - RNA, 20 nt, synthetic construct
  misc_feature 1..20: note = source = /note="Description of Artificial Sequence: Synthetic oligonucleotide"
  source 1..20: mol_type = other RNA
aatcctagatgactttggta

SEQ ID NO: 2230 - RNA, 20 nt, synthetic construct
  misc_feature 1..20: note = source = /note="Description of Artificial Sequence: Synthetic oligonucleotide"
  source 1..20: mol_type = other RNA
agatgactttggtatggcag

SEQ ID NO: 2231 - RNA, 20 nt, synthetic construct
  misc_feature 1..20: note = source = /note="Description of Artificial Sequence: Synthetic oligonucleotide"
  source 1..20: mol_type = other RNA
ttttttagatacagctccaa

SEQ ID NO: 2232 - RNA, 20 nt, synthetic construct
  misc_feature 1..20: note = source = /note="Description of Artificial Sequence: Synthetic oligonucleotide"
  source 1..20: mol_type = other RNA
tccaaaggcacgatacatga

SEQ ID NO: 2233 - RNA, 20 nt, synthetic construct
  misc_feature 1..20: note = source = /note="Description of Artificial Sequence: Synthetic oligonucleotide"
  source 1..20: mol_type = other RNA
gaaggaaatgattgacaagc

SEQ ID NO: 2234 - RNA, 20 nt, synthetic construct
  misc_feature 1..20: note = source = /note="Description of Artificial Sequence: Synthetic oligonucleotide"
  source 1..20: mol_type = other RNA
atgagaagacaagccacaga

SEQ ID NO: 2235 - RNA, 20 nt, synthetic construct
  misc_feature 1..20: note = source = /note="Description of Artificial Sequence: Synthetic oligonucleotide"
  source 1..20: mol_type = other RNA
gcaaaagatacttctcataa

SEQ ID NO: 2236 - RNA, 20 nt, synthetic construct
  misc_feature 1..20: note = source = /note="Description of Artificial Sequence: Synthetic oligonucleotide"
  source 1..20: mol_type = other RNA
cacaagtgtcaagaaagcat

SEQ ID NO: 2237 - RNA, 20 nt, synthetic construct
  misc_feature 1..20: note = source = /note="Description of Artificial Sequence: Synthetic oligonucleotide"
  source 1..20: mol_type = other RNA
tgttaaacatcatagtcatt

SEQ ID NO: 2238 - RNA, 20 nt, synthetic construct
  misc_feature 1..20: note = source = /note="Description of Artificial Sequence: Synthetic oligonucleotide"
  source 1..20: mol_type = other RNA
gttaaacatcatagtcatta

SEQ ID NO: 2239 - RNA, 20 nt, synthetic construct
  misc_feature 1..20: note = source = /note="Description of Artificial Sequence: Synthetic oligonucleotide"
  source 1..20: mol_type = other RNA
ccgctacatacctgttagaa

SEQ ID NO: 2240 - RNA, 20 nt, synthetic construct
  misc_feature 1..20: note = source = /note="Description of Artificial Sequence: Synthetic oligonucleotide"
  source 1..20: mol_type = other RNA
acactgatgaaaccaagtgc

SEQ ID NO: 2241 - RNA, 20 nt, synthetic construct
  misc_feature 1..20: note = source = /note="Description of Artificial Sequence: Synthetic oligonucleotide"
  source 1..20: mol_type = other RNA
accaagtgctggtgagaatg

SEQ ID NO: 2242 - RNA, 20 nt, synthetic construct
  misc_feature 1..20: note = source = /note="Description of Artificial Sequence: Synthetic oligonucleotide"
  source 1..20: mol_type = other RNA
tggtgagaatgtggagcaac

SEQ ID NO: 2243 - RNA, 20 nt, synthetic construct
  misc_feature 1..20: note = source = /note="Description of Artificial Sequence: Synthetic oligonucleotide"
  source 1..20: mol_type = other RNA
caggaaccttcattcattgc

SEQ ID NO: 2244 - RNA, 20 nt, synthetic construct
  misc_feature 1..20: note = source = /note="Description of Artificial Sequence: Synthetic oligonucleotide"
  source 1..20: mol_type = other RNA
ttgctggtaagaattcaaaa

SEQ ID NO: 2245 - RNA, 20 nt, synthetic construct
  misc_feature 1..20: note = source = /note="Description of Artificial Sequence: Synthetic oligonucleotide"
  source 1..20: mol_type = other RNA
tcaaaatggcatagtcactt

SEQ ID NO: 2246 - RNA, 20 nt, synthetic construct
  misc_feature 1..20: note = source = /note="Description of Artificial Sequence: Synthetic oligonucleotide"
  source 1..20: mol_type = other RNA
agtcactttggaagacagtt

SEQ ID NO: 2247 - RNA, 20 nt, synthetic construct
  misc_feature 1..20: note = source = /note="Description of Artificial Sequence: Synthetic oligonucleotide"
  source 1..20: mol_type = other RNA
gattcagcaatagcgctcct

SEQ ID NO: 2248 - RNA, 20 nt, synthetic construct
  misc_feature 1..20: note = source = /note="Description of Artificial Sequence: Synthetic oligonucleotide"
  source 1..20: mol_type = other RNA
agcaatagcgctccttggta

SEQ ID NO: 2249 - RNA, 20 nt, synthetic construct
  misc_feature 1..20: note = source = /note="Description of Artificial Sequence: Synthetic oligonucleotide"
  source 1..20: mol_type = other RNA
ggacttgaaaacttatgtcc

SEQ ID NO: 2250 - RNA, 20 nt, synthetic construct
  misc_feature 1..20: note = source = /note="Description of Artificial Sequence: Synthetic oligonucleotide"
  source 1..20: mol_type = other RNA
ttgaaaacttatgtcctggc

SEQ ID NO: 2251 - RNA, 20 nt, synthetic construct
  misc_feature 1..20: note = source = /note="Description of Artificial Sequence: Synthetic oligonucleotide"
  source 1..20: mol_type = other RNA
tgaaaacttatgtcctggcc

SEQ ID NO: 2252 - RNA, 20 nt, synthetic construct
  misc_feature 1..20: note = source = /note="Description of Artificial Sequence: Synthetic oligonucleotide"
  source 1..20: mol_type = other RNA
cgcctgtaattgcagcactt

SEQ ID NO: 2253 - RNA, 20 nt, synthetic construct
  misc_feature 1..20: note = source = /note="Description of Artificial Sequence: Synthetic oligonucleotide"
  source 1..20: mol_type = other RNA
gcctgtaattgcagcacttt

SEQ ID NO: 2254 - RNA, 20 nt, synthetic construct
  misc_feature 1..20: note = source = /note="Description of Artificial Sequence: Synthetic oligonucleotide"
  source 1..20: mol_type = other RNA
tgtaattgcagcactttggg

SEQ ID NO: 2255 - RNA, 20 nt, synthetic construct
  misc_feature 1..20: note = source = /note="Description of Artificial Sequence: Synthetic oligonucleotide"
  source 1..20: mol_type = other RNA
tgcagcactttgggaggccc

SEQ ID NO: 2256 - RNA, 20 nt, synthetic construct
  misc_feature 1..20: note = source = /note="Description of Artificial Sequence: Synthetic oligonucleotide"
  source 1..20: mol_type = other RNA
gcactttgggaggcccaggc

SEQ ID NO: 2257 - RNA, 20 nt, synthetic construct
  misc_feature 1..20: note = source = /note="Description of Artificial Sequence: Synthetic oligonucleotide"
  source 1..20: mol_type = other RNA
ctttgggaggcccaggcagg

SEQ ID NO: 2258 - RNA, 20 nt, synthetic construct
  misc_feature 1..20: note = source = /note="Description of Artificial Sequence: Synthetic oligonucleotide"
  source 1..20: mol_type = other RNA
ccaggcaggtggatcatttg

SEQ ID NO: 2259 - RNA, 20 nt, synthetic construct
  misc_feature 1..20: note = source = /note="Description of Artificial Sequence: Synthetic oligonucleotide"
  source 1..20: mol_type = other RNA
caggtggatcatttgaggtc

SEQ ID NO: 2260 - RNA, 20 nt, synthetic construct
  misc_feature 1..20: note = source = /note="Description of Artificial Sequence: Synthetic oligonucleotide"
  source 1..20: mol_type = other RNA
tcaggagttcaagaccagcc

SEQ ID NO: 2261 - RNA, 20 nt, synthetic construct
  misc_feature 1..20: note = source = /note="Description of Artificial Sequence: Synthetic oligonucleotide"
  source 1..20: mol_type = other RNA
accagcctggtgaaatccca

SEQ ID NO: 2262 - RNA, 20 nt, synthetic construct
  misc_feature 1..20: note = source = /note="Description of Artificial Sequence: Synthetic oligonucleotide"
  source 1..20: mol_type = other RNA
taaagatacaaaaaagtagc

SEQ ID NO: 2263 - RNA, 20 nt, synthetic construct
  misc_feature 1..20: note = source = /note="Description of Artificial Sequence: Synthetic oligonucleotide"
  source 1..20: mol_type = other RNA
aaagatacaaaaaagtagct

SEQ ID NO: 2264 - RNA, 20 nt, synthetic construct
  misc_feature 1..20: note = source = /note="Description of Artificial Sequence: Synthetic oligonucleotide"
  source 1..20: mol_type = other RNA
tacaaaaaagtagctgggtg

SEQ ID NO: 2265 - RNA, 20 nt, synthetic construct
  misc_feature 1..20: note = source = /note="Description of Artificial Sequence: Synthetic oligonucleotide"
  source 1..20: mol_type = other RNA
cgcctgtaatctcagctact

SEQ ID NO: 2266 - RNA, 20 nt, synthetic construct
  misc_feature 1..20: note = source = /note="Description of Artificial Sequence: Synthetic oligonucleotide"
  source 1..20: mol_type = other RNA
gcctgtaatctcagctacta

SEQ ID NO: 2267 - RNA, 20 nt, synthetic construct
  misc_feature 1..20: note = source = /note="Description of Artificial Sequence: Synthetic oligonucleotide"
  source 1..20: mol_type = other RNA
tgtaatctcagctactaggg

SEQ ID NO: 2268 - RNA, 20 nt, synthetic construct
  misc_feature 1..20: note = source = /note="Description of Artificial Sequence: Synthetic oligonucleotide"
  source 1..20: mol_type = other RNA
ctcagctactagggaggctg

SEQ ID NO: 2269 - RNA, 20 nt, synthetic construct
  misc_feature 1..20: note = source = /note="Description of Artificial Sequence: Synthetic oligonucleotide"
  source 1..20: mol_type = other RNA
gctactagggaggctgaggc

SEQ ID NO: 2270 - RNA, 20 nt, synthetic construct
  misc_feature 1..20: note = source = /note="Description of Artificial Sequence: Synthetic oligonucleotide"
  source 1..20: mol_type = other RNA
caggagaatcacttgagccc

SEQ ID NO: 2271 - RNA, 20 nt, synthetic construct
  misc_feature 1..20: note = source = /note="Description of Artificial Sequence: Synthetic oligonucleotide"
  source 1..20: mol_type = other RNA
gagaatcacttgagcccagg

SEQ ID NO: 2272 - RNA, 20 nt, synthetic construct
  misc_feature 1..20: note = source = /note="Description of Artificial Sequence: Synthetic oligonucleotide"
  source 1..20: mol_type = other RNA
aatcacttgagcccaggagg

SEQ ID NO: 2273 - RNA, 20 nt, synthetic construct
  misc_feature 1..20: note = source = /note="Description of Artificial Sequence: Synthetic oligonucleotide"
  source 1..20: mol_type = other RNA
cacttgagcccaggaggcgg

SEQ ID NO: 2274 - RNA, 20 nt, synthetic construct
  misc_feature 1..20: note = source = /note="Description of Artificial Sequence: Synthetic oligonucleotide"
  source 1..20: mol_type = other RNA
tttacataattgccaaaact

SEQ ID NO: 2275 - RNA, 20 nt, synthetic construct
  misc_feature 1..20: note = source = /note="Description of Artificial Sequence: Synthetic oligonucleotide"
  source 1..20: mol_type = other RNA
ttacataattgccaaaactt

SEQ ID NO: 2276 - RNA, 20 nt, synthetic construct
  misc_feature 1..20: note = source = /note="Description of Artificial Sequence: Synthetic oligonucleotide"
  source 1..20: mol_type = other RNA
gatatcctttaatatttgag

SEQ ID NO: 2277 - RNA, 20 nt, synthetic construct
  misc_feature 1..20: note = source = /note="Description of Artificial Sequence: Synthetic oligonucleotide"
  source 1..20: mol_type = other RNA
atatttgagtggataaactg

SEQ ID NO: 2278 - RNA, 20 nt, synthetic construct
  misc_feature 1..20: note = source = /note="Description of Artificial Sequence: Synthetic oligonucleotide"
  source 1..20: mol_type = other RNA
tatcacatcataaaacgaca

SEQ ID NO: 2279 - RNA, 20 nt, synthetic construct
  misc_feature 1..20: note = source = /note="Description of Artificial Sequence: Synthetic oligonucleotide"
  source 1..20: mol_type = other RNA
tgaaagaagctaatccgaaa

SEQ ID NO: 2280 - RNA, 20 nt, synthetic construct
  misc_feature 1..20: note = source = /note="Description of Artificial Sequence: Synthetic oligonucleotide"
  source 1..20: mol_type = other RNA
attccaactatatgacattc

SEQ ID NO: 2281 - RNA, 20 nt, synthetic construct
  misc_feature 1..20: note = source = /note="Description of Artificial Sequence: Synthetic oligonucleotide"
  source 1..20: mol_type = other RNA
ttccggaaaagccaaaatta

SEQ ID NO: 2282 - RNA, 20 nt, synthetic construct
  misc_feature 1..20: note = source = /note="Description of Artificial Sequence: Synthetic oligonucleotide"
  source 1..20: mol_type = other RNA
aaaagagcagtgttttccag

SEQ ID NO: 2283 - RNA, 20 nt, synthetic construct
  misc_feature 1..20: note = source = /note="Description of Artificial Sequence: Synthetic oligonucleotide"
  source 1..20: mol_type = other RNA
aaagagcagtgttttccaga

SEQ ID NO: 2284 - RNA, 20 nt, synthetic construct
  misc_feature 1..20: note = source = /note="Description of Artificial Sequence: Synthetic oligonucleotide"
  source 1..20: mol_type = other RNA
gagcagtgttttccagaggg

SEQ ID NO: 2285 - RNA, 20 nt, synthetic construct
  misc_feature 1..20: note = source = /note="Description of Artificial Sequence: Synthetic oligonucleotide"
  source 1..20: mol_type = other RNA
ttccagagggaggaatgtat

SEQ ID NO: 2286 - RNA, 20 nt, synthetic construct
  misc_feature 1..20: note = source = /note="Description of Artificial Sequence: Synthetic oligonucleotide"
  source 1..20: mol_type = other RNA
gaatctatgtaatactatag

SEQ ID NO: 2287 - RNA, 20 nt, synthetic construct
  misc_feature 1..20: note = source = /note="Description of Artificial Sequence: Synthetic oligonucleotide"
  source 1..20: mol_type = other RNA
tctatgtaatactatagtgg

SEQ ID NO: 2288 - RNA, 20 nt, synthetic construct
  misc_feature 1..20: note = source = /note="Description of Artificial Sequence: Synthetic oligonucleotide"
  source 1..20: mol_type = other RNA
atacatttgtccaaacacgt

SEQ ID NO: 2289 - RNA, 20 nt, synthetic construct
  misc_feature 1..20: note = source = /note="Description of Artificial Sequence: Synthetic oligonucleotide"
  source 1..20: mol_type = other RNA
gtgaaccctaatgtaaacta

SEQ ID NO: 2290 - RNA, 20 nt, synthetic construct
  misc_feature 1..20: note = source = /note="Description of Artificial Sequence: Synthetic oligonucleotide"
  source 1..20: mol_type = other RNA
tgaaccctaatgtaaactat

SEQ ID NO: 2291 - RNA, 20 nt, synthetic construct
  misc_feature 1..20: note = source = /note="Description of Artificial Sequence: Synthetic oligonucleotide"
  source 1..20: mol_type = other RNA
gaaccctaatgtaaactatg

SEQ ID NO: 2292 - RNA, 20 nt, synthetic construct
  misc_feature 1..20: note = source = /note="Description of Artificial Sequence: Synthetic oligonucleotide"
  source 1..20: mol_type = other RNA
ctaatgtaaactatggggtt

SEQ ID NO: 2293 - RNA, 20 nt, synthetic construct
  misc_feature 1..20: note = source = /note="Description of Artificial Sequence: Synthetic oligonucleotide"
  source 1..20: mol_type = other RNA
taatgtaaactatggggttt

SEQ ID NO: 2294 - RNA, 20 nt, synthetic construct
  misc_feature 1..20: note = source = /note="Description of Artificial Sequence: Synthetic oligonucleotide"
  source 1..20: mol_type = other RNA
gtatcaaaatgcatcaatgt

SEQ ID NO: 2295 - RNA, 20 nt, synthetic construct
  misc_feature 1..20: note = source = /note="Description of Artificial Sequence: Synthetic oligonucleotide"
  source 1..20: mol_type = other RNA
ttgtaacaaatataccactc

SEQ ID NO: 2296 - RNA, 20 nt, synthetic construct
  misc_feature 1..20: note = source = /note="Description of Artificial Sequence: Synthetic oligonucleotide"
  source 1..20: mol_type = other RNA
acaaatataccactctggta

SEQ ID NO: 2297 - RNA, 20 nt, synthetic construct
  misc_feature 1..20: note = source = /note="Description of Artificial Sequence: Synthetic oligonucleotide"
  source 1..20: mol_type = other RNA
caaatataccactctggtat

SEQ ID NO: 2298 - RNA, 20 nt, synthetic construct
  misc_feature 1..20: note = source = /note="Description of Artificial Sequence: Synthetic oligonucleotide"
  source 1..20: mol_type = other RNA
ctggtatgggatgttgataa

SEQ ID NO: 2299 - RNA, 20 nt, synthetic construct
  misc_feature 1..20: note = source = /note="Description of Artificial Sequence: Synthetic oligonucleotide"
  source 1..20: mol_type = other RNA
tggtatgggatgttgataat

SEQ ID NO: 2300 - RNA, 20 nt, synthetic construct
  misc_feature 1..20: note = source = /note="Description of Artificial Sequence: Synthetic oligonucleotide"
  source 1..20: mol_type = other RNA
ggtatgggatgttgataatg

SEQ ID NO: 2301 - RNA, 20 nt, synthetic construct
  misc_feature 1..20: note = source = /note="Description of Artificial Sequence: Synthetic oligonucleotide"
  source 1..20: mol_type = other RNA
tgggatgttgataatgggga

SEQ ID NO: 2302 - RNA, 20 nt, synthetic construct
  misc_feature 1..20: note = source = /note="Description of Artificial Sequence: Synthetic oligonucleotide"
  source 1..20: mol_type = other RNA
gttgataatggggaaggttg

SEQ ID NO: 2303 - RNA, 20 nt, synthetic construct
  misc_feature 1..20: note = source = /note="Description of Artificial Sequence: Synthetic oligonucleotide"
  source 1..20: mol_type = other RNA
ttgataatggggaaggttgt

SEQ ID NO: 2304 - RNA, 20 nt, synthetic construct
  misc_feature 1..20: note = source = /note="Description of Artificial Sequence: Synthetic oligonucleotide"
  source 1..20: mol_type = other RNA
tggggaaggttgtgggtctg

SEQ ID NO: 2305 - RNA, 20 nt, synthetic construct
  misc_feature 1..20: note = source = /note="Description of Artificial Sequence: Synthetic oligonucleotide"
  source 1..20: mol_type = other RNA
ggggaaggttgtgggtctgt

SEQ ID NO: 2306 - RNA, 20 nt, synthetic construct
  misc_feature 1..20: note = source = /note="Description of Artificial Sequence: Synthetic oligonucleotide"
  source 1..20: mol_type = other RNA
gggaaggttgtgggtctgtg

SEQ ID NO: 2307 - RNA, 20 nt, synthetic construct
  misc_feature 1..20: note = source = /note="Description of Artificial Sequence: Synthetic oligonucleotide"
  source 1..20: mol_type = other RNA
ggttgtgggtctgtggggac

SEQ ID NO: 2308 - RNA, 20 nt, synthetic construct
  misc_feature 1..20: note = source = /note="Description of Artificial Sequence: Synthetic oligonucleotide"
  source 1..20: mol_type = other RNA
gttgtgggtctgtggggaca

SEQ ID NO: 2309 - RNA, 20 nt, synthetic construct
  misc_feature 1..20: note = source = /note="Description of Artificial Sequence: Synthetic oligonucleotide"
  source 1..20: mol_type = other RNA
ttgtgggtctgtggggacag

SEQ ID NO: 2310 - RNA, 20 nt, synthetic construct
  misc_feature 1..20: note = source = /note="Description of Artificial Sequence: Synthetic oligonucleotide"
  source 1..20: mol_type = other RNA
tctgtggggacaggggtata

SEQ ID NO: 2311 - RNA, 20 nt, synthetic construct
  misc_feature 1..20: note = source = /note="Description of Artificial Sequence: Synthetic oligonucleotide"
  source 1..20: mol_type = other RNA
ctgtggggacaggggtatat

SEQ ID NO: 2312 - RNA, 20 nt, synthetic construct
  misc_feature 1..20: note = source = /note="Description of Artificial Sequence: Synthetic oligonucleotide"
  source 1..20: mol_type = other RNA
aataataataaaataaattt

SEQ ID NO: 2313 - RNA, 20 nt, synthetic construct
  misc_feature 1..20: note = source = /note="Description of Artificial Sequence: Synthetic oligonucleotide"
  source 1..20: mol_type = other RNA
tgagactgagtaatttataa

SEQ ID NO: 2314 - RNA, 20 nt, synthetic construct
  misc_feature 1..20: note = source = /note="Description of Artificial Sequence: Synthetic oligonucleotide"
  source 1..20: mol_type = other RNA
aattgactcacagtttagca

SEQ ID NO: 2315 - RNA, 20 nt, synthetic construct
  misc_feature 1..20: note = source = /note="Description of Artificial Sequence: Synthetic oligonucleotide"
  source 1..20: mol_type = other RNA
gactcacagtttagcatggc

SEQ ID NO: 2316 - RNA, 20 nt, synthetic construct
  misc_feature 1..20: note = source = /note="Description of Artificial Sequence: Synthetic oligonucleotide"
  source 1..20: mol_type = other RNA
actcacagtttagcatggct

SEQ ID NO: 2317 - RNA, 20 nt, synthetic construct
  misc_feature 1..20: note = source = /note="Description of Artificial Sequence: Synthetic oligonucleotide"
  source 1..20: mol_type = other RNA
ctcacagtttagcatggctg

SEQ ID NO: 2318 - RNA, 20 nt, synthetic construct
  misc_feature 1..20: note = source = /note="Description of Artificial Sequence: Synthetic oligonucleotide"
  source 1..20: mol_type = other RNA
acagtttagcatggctgggg

SEQ ID NO: 2319 - RNA, 20 nt, synthetic construct
  misc_feature 1..20: note = source = /note="Description of Artificial Sequence: Synthetic oligonucleotide"
  source 1..20: mol_type = other RNA
agcatggctggggaggtctc

SEQ ID NO: 2320 - RNA, 20 nt, synthetic construct
  misc_feature 1..20: note = source = /note="Description of Artificial Sequence: Synthetic oligonucleotide"
  source 1..20: mol_type = other RNA
ctcaggaaacttaacagtca

SEQ ID NO: 2321 - RNA, 20 nt, synthetic construct
  misc_feature 1..20: note = source = /note="Description of Artificial Sequence: Synthetic oligonucleotide"
  source 1..20: mol_type = other RNA
ggaaacttaacagtcatggc

SEQ ID NO: 2322 - RNA, 20 nt, synthetic construct
  misc_feature 1..20: note = source = /note="Description of Artificial Sequence: Synthetic oligonucleotide"
  source 1..20: mol_type = other RNA
tggcaggtgacttcacaaag

SEQ ID NO: 2323 - RNA, 20 nt, synthetic construct
  misc_feature 1..20: note = source = /note="Description of Artificial Sequence: Synthetic oligonucleotide"
  source 1..20: mol_type = other RNA
aggtgacttcacaaagtggc

SEQ ID NO: 2324 - RNA, 20 nt, synthetic construct
  misc_feature 1..20: note = source = /note="Description of Artificial Sequence: Synthetic oligonucleotide"
  source 1..20: mol_type = other RNA
gacttcacaaagtggcagga

SEQ ID NO: 2325 - RNA, 20 nt, synthetic construct
  misc_feature 1..20: note = source = /note="Description of Artificial Sequence: Synthetic oligonucleotide"
  source 1..20: mol_type = other RNA
tccctatgatgagaacagca

SEQ ID NO: 2326 - RNA, 20 nt, synthetic construct
  misc_feature 1..20: note = source = /note="Description of Artificial Sequence: Synthetic oligonucleotide"
  source 1..20: mol_type = other RNA
ccctatgatgagaacagcat

SEQ ID NO: 2327 - RNA, 20 nt, synthetic construct
  misc_feature 1..20: note = source = /note="Description of Artificial Sequence: Synthetic oligonucleotide"
  source 1..20: mol_type = other RNA
cctatgatgagaacagcatg

SEQ ID NO: 2328 - RNA, 20 nt, synthetic construct
  misc_feature 1..20: note = source = /note="Description of Artificial Sequence: Synthetic oligonucleotide"
  source 1..20: mol_type = other RNA
ctatgatgagaacagcatgg

SEQ ID NO: 2329 - RNA, 20 nt, synthetic construct
  misc_feature 1..20: note = source = /note="Description of Artificial Sequence: Synthetic oligonucleotide"
  source 1..20: mol_type = other RNA
atgatccaattacttccacc

SEQ ID NO: 2330 - RNA, 20 nt, synthetic construct
  misc_feature 1..20: note = source = /note="Description of Artificial Sequence: Synthetic oligonucleotide"
  source 1..20: mol_type = other RNA
ctggtctctgccttgacaca

SEQ ID NO: 2331 - RNA, 20 nt, synthetic construct
  misc_feature 1..20: note = source = /note="Description of Artificial Sequence: Synthetic oligonucleotide"
  source 1..20: mol_type = other RNA
tggtctctgccttgacacat

SEQ ID NO: 2332 - RNA, 20 nt, synthetic construct
  misc_feature 1..20: note = source = /note="Description of Artificial Sequence: Synthetic oligonucleotide"
  source 1..20: mol_type = other RNA
gccttgacacatgggtatta

SEQ ID NO: 2333 - RNA, 20 nt, synthetic construct
  misc_feature 1..20: note = source = /note="Description of Artificial Sequence: Synthetic oligonucleotide"
  source 1..20: mol_type = other RNA
catgggtattatggagatta

SEQ ID NO: 2334 - RNA, 20 nt, synthetic construct
  misc_feature 1..20: note = source = /note="Description of Artificial Sequence: Synthetic oligonucleotide"
  source 1..20: mol_type = other RNA
atgggtattatggagattat

SEQ ID NO: 2335 - RNA, 20 nt, synthetic construct
  misc_feature 1..20: note = source = /note="Description of Artificial Sequence: Synthetic oligonucleotide"
  source 1..20: mol_type = other RNA
tgggtattatggagattatg

SEQ ID NO: 2336 - RNA, 20 nt, synthetic construct
  misc_feature 1..20: note = source = /note="Description of Artificial Sequence: Synthetic oligonucleotide"
  source 1..20: mol_type = other RNA
ttataattcaagatgagatt

SEQ ID NO: 2337 - RNA, 20 nt, synthetic construct
  misc_feature 1..20: note = source = /note="Description of Artificial Sequence: Synthetic oligonucleotide"
  source 1..20: mol_type = other RNA
tataattcaagatgagattt

SEQ ID NO: 2338 - RNA, 20 nt, synthetic construct
  misc_feature 1..20: note = source = /note="Description of Artificial Sequence: Synthetic oligonucleotide"
  source 1..20: mol_type = other RNA
aattcaagatgagatttggg

SEQ ID NO: 2339 - RNA, 20 nt, synthetic construct
  misc_feature 1..20: note = source = /note="Description of Artificial Sequence: Synthetic oligonucleotide"
  source 1..20: mol_type = other RNA
attcaagatgagatttgggt

SEQ ID NO: 2340 - RNA, 20 nt, synthetic construct
  misc_feature 1..20: note = source = /note="Description of Artificial Sequence: Synthetic oligonucleotide"
  source 1..20: mol_type = other RNA
ttcaagatgagatttgggtg

SEQ ID NO: 2341 - RNA, 20 nt, synthetic construct
  misc_feature 1..20: note = source = /note="Description of Artificial Sequence: Synthetic oligonucleotide"
  source 1..20: mol_type = other RNA
aaactatgtcttttctttta

SEQ ID NO: 2342 - RNA, 20 nt, synthetic construct
  misc_feature 1..20: note = source = /note="Description of Artificial Sequence: Synthetic oligonucleotide"
  source 1..20: mol_type = other RNA
aactatgtcttttcttttat

SEQ ID NO: 2343 - RNA, 20 nt, synthetic construct
  misc_feature 1..20: note = source = /note="Description of Artificial Sequence: Synthetic oligonucleotide"
  source 1..20: mol_type = other RNA
actatgtcttttcttttatg

SEQ ID NO: 2344 - RNA, 20 nt, synthetic construct
  misc_feature 1..20: note = source = /note="Description of Artificial Sequence: Synthetic oligonucleotide"
  source 1..20: mol_type = other RNA
gacctccattttccaatttc

SEQ ID NO: 2345 - RNA, 20 nt, synthetic construct
  misc_feature 1..20: note = source = /note="Description of Artificial Sequence: Synthetic oligonucleotide"
  source 1..20: mol_type = other RNA
ccattttccaatttctggtt

SEQ ID NO: 2346 - RNA, 20 nt, synthetic construct
  misc_feature 1..20: note = source = /note="Description of Artificial Sequence: Synthetic oligonucleotide"
  source 1..20: mol_type = other RNA
aatctttcattaaaagaaat

SEQ ID NO: 2347 - RNA, 20 nt, synthetic construct
  misc_feature 1..20: note = source = /note="Description of Artificial Sequence: Synthetic oligonucleotide"
  source 1..20: mol_type = other RNA
atctttcattaaaagaaata

SEQ ID NO: 2348 - RNA, 20 nt, synthetic construct
  misc_feature 1..20: note = source = /note="Description of Artificial Sequence: Synthetic oligonucleotide"
  source 1..20: mol_type = other RNA
tctttcattaaaagaaatag

SEQ ID NO: 2349 - RNA, 20 nt, synthetic construct
  misc_feature 1..20: note = source = /note="Description of Artificial Sequence: Synthetic oligonucleotide"
  source 1..20: mol_type = other RNA
ttcattaaaagaaatagggg

SEQ ID NO: 2350 - RNA, 20 nt, synthetic construct
  misc_feature 1..20: note = source = /note="Description of Artificial Sequence: Synthetic oligonucleotide"
  source 1..20: mol_type = other RNA
aaaagaaataggggaggtga

SEQ ID NO: 2351 - RNA, 20 nt, synthetic construct
  misc_feature 1..20: note = source = /note="Description of Artificial Sequence: Synthetic oligonucleotide"
  source 1..20: mol_type = other RNA
aaagaaataggggaggtgat

SEQ ID NO: 2352 - RNA, 20 nt, synthetic construct
  misc_feature 1..20: note = source = /note="Description of Artificial Sequence: Synthetic oligonucleotide"
  source 1..20: mol_type = other RNA
aagaaataggggaggtgatg

SEQ ID NO: 2353 - RNA, 20 nt, synthetic construct
  misc_feature 1..20: note = source = /note="Description of Artificial Sequence: Synthetic oligonucleotide"
  source 1..20: mol_type = other RNA
agaaataggggaggtgatgg

SEQ ID NO: 2354 - RNA, 20 nt, synthetic construct
  misc_feature 1..20: note = source = /note="Description of Artificial Sequence: Synthetic oligonucleotide"
  source 1..20: mol_type = other RNA
gggatatccatgagtgtcca

SEQ ID NO: 2355 - RNA, 20 nt, synthetic construct
  misc_feature 1..20: note = source = /note="Description of Artificial Sequence: Synthetic oligonucleotide"
  source 1..20: mol_type = other RNA
ggatatccatgagtgtccat

SEQ ID NO: 2356 - RNA, 20 nt, synthetic construct
  misc_feature 1..20: note = source = /note="Description of Artificial Sequence: Synthetic oligonucleotide"
  source 1..20: mol_type = other RNA
atgatactgcaaagcctaca

SEQ ID NO: 2357 - RNA, 20 nt, synthetic construct
  misc_feature 1..20: note = source = /note="Description of Artificial Sequence: Synthetic oligonucleotide"
  source 1..20: mol_type = other RNA
atcttgtttcattttatgtg

SEQ ID NO: 2358 - RNA, 20 nt, synthetic construct
  misc_feature 1..20: note = source = /note="Description of Artificial Sequence: Synthetic oligonucleotide"
  source 1..20: mol_type = other RNA
tgaaaaatatcctcttcatt

SEQ ID NO: 2359 - RNA, 20 nt, synthetic construct
  misc_feature 1..20: note = source = /note="Description of Artificial Sequence: Synthetic oligonucleotide"
  source 1..20: mol_type = other RNA
gaaaaatatcctcttcattt

SEQ ID NO: 2360 - RNA, 20 nt, synthetic construct
  misc_feature 1..20: note = source = /note="Description of Artificial Sequence: Synthetic oligonucleotide"
  source 1..20: mol_type = other RNA
ataatgcatgacttcattca

SEQ ID NO: 2361 - RNA, 20 nt, synthetic construct
  misc_feature 1..20: note = source = /note="Description of Artificial Sequence: Synthetic oligonucleotide"
  source 1..20: mol_type = other RNA
gacttcattcatggctctct

SEQ ID NO: 2362 - RNA, 20 nt, synthetic construct
  misc_feature 1..20: note = source = /note="Description of Artificial Sequence: Synthetic oligonucleotide"
  source 1..20: mol_type = other RNA
gtgacctgtgtaccctgacc

SEQ ID NO: 2363 - RNA, 20 nt, synthetic construct
  misc_feature 1..20: note = source = /note="Description of Artificial Sequence: Synthetic oligonucleotide"
  source 1..20: mol_type = other RNA
agagtattaagtcatttcag

SEQ ID NO: 2364 - RNA, 20 nt, synthetic construct
  misc_feature 1..20: note = source = /note="Description of Artificial Sequence: Synthetic oligonucleotide"
  source 1..20: mol_type = other RNA
atttcagtggcacatgtttg

SEQ ID NO: 2365 - RNA, 20 nt, synthetic construct
  misc_feature 1..20: note = source = /note="Description of Artificial Sequence: Synthetic oligonucleotide"
  source 1..20: mol_type = other RNA
tttcagtggcacatgtttga

SEQ ID NO: 2366 - RNA, 20 nt, synthetic construct
  misc_feature 1..20: note = source = /note="Description of Artificial Sequence: Synthetic oligonucleotide"
  source 1..20: mol_type = other RNA
agggaagattgacatcccac

SEQ ID NO: 2367 - RNA, 20 nt, synthetic construct
  misc_feature 1..20: note = source = /note="Description of Artificial Sequence: Synthetic oligonucleotide"
  source 1..20: mol_type = other RNA
aagcagctgcattcctagtg

SEQ ID NO: 2368 - RNA, 20 nt, synthetic construct
  misc_feature 1..20: note = source = /note="Description of Artificial Sequence: Synthetic oligonucleotide"
  source 1..20: mol_type = other RNA
attaagtttatcccactatt

SEQ ID NO: 2369 - RNA, 20 nt, synthetic construct
  misc_feature 1..20: note = source = /note="Description of Artificial Sequence: Synthetic oligonucleotide"
  source 1..20: mol_type = other RNA
tttatcccactattaggttc

SEQ ID NO: 2370 - RNA, 20 nt, synthetic construct
  misc_feature 1..20: note = source = /note="Description of Artificial Sequence: Synthetic oligonucleotide"
  source 1..20: mol_type = other RNA
tattacttgtcatgcccaag

SEQ ID NO: 2371 - RNA, 20 nt, synthetic construct
  misc_feature 1..20: note = source = /note="Description of Artificial Sequence: Synthetic oligonucleotide"
  source 1..20: mol_type = other RNA
tttctagcatgcagagtatc

SEQ ID NO: 2372 - RNA, 20 nt, synthetic construct
  misc_feature 1..20: note = source = /note="Description of Artificial Sequence: Synthetic oligonucleotide"
  source 1..20: mol_type = other RNA
gcagagtatctggtttttaa

SEQ ID NO: 2373 - RNA, 20 nt, synthetic construct
  misc_feature 1..20: note = source = /note="Description of Artificial Sequence: Synthetic oligonucleotide"
  source 1..20: mol_type = other RNA
gaaataaaatgtgcctacta

SEQ ID NO: 2374 - RNA, 20 nt, synthetic construct
  misc_feature 1..20: note = source = /note="Description of Artificial Sequence: Synthetic oligonucleotide"
  source 1..20: mol_type = other RNA
aaataaaatgtgcctactaa

SEQ ID NO: 2375 - RNA, 20 nt, synthetic construct
  misc_feature 1..20: note = source = /note="Description of Artificial Sequence: Synthetic oligonucleotide"
  source 1..20: mol_type = other RNA
tctttcactgttttttttct

SEQ ID NO: 2376 - RNA, 20 nt, synthetic construct
  misc_feature 1..20: note = source = /note="Description of Artificial Sequence: Synthetic oligonucleotide"
  source 1..20: mol_type = other RNA
ttcactgttttttttcttgg

SEQ ID NO: 2377 - RNA, 20 nt, synthetic construct
  misc_feature 1..20: note = source = /note="Description of Artificial Sequence: Synthetic oligonucleotide"
  source 1..20: mol_type = other RNA
ttacagtagttatgcctttc

SEQ ID NO: 2378 - RNA, 20 nt, synthetic construct
  misc_feature 1..20: note = source = /note="Description of Artificial Sequence: Synthetic oligonucleotide"
  source 1..20: mol_type = other RNA
gttatgcctttctggtcagc

SEQ ID NO: 2379 - RNA, 20 nt, synthetic construct
  misc_feature 1..20: note = source = /note="Description of Artificial Sequence: Synthetic oligonucleotide"
  source 1..20: mol_type = other RNA
ctttcacatcttcaagtgta

SEQ ID NO: 2380 - RNA, 20 nt, synthetic construct
  misc_feature 1..20: note = source = /note="Description of Artificial Sequence: Synthetic oligonucleotide"
  source 1..20: mol_type = other RNA
ctttcagtattgatttctca

SEQ ID NO: 2381 - RNA, 20 nt, synthetic construct
  misc_feature 1..20: note = source = /note="Description of Artificial Sequence: Synthetic oligonucleotide"
  source 1..20: mol_type = other RNA
cctatgaacctgagtcaact

SEQ ID NO: 2382 - RNA, 20 nt, synthetic construct
  misc_feature 1..20: note = source = /note="Description of Artificial Sequence: Synthetic oligonucleotide"
  source 1..20: mol_type = other RNA
cctgagtcaacttggcataa

SEQ ID NO: 2383 - RNA, 20 nt, synthetic construct
  misc_feature 1..20: note = source = /note="Description of Artificial Sequence: Synthetic oligonucleotide"
  source 1..20: mol_type = other RNA
ttctctaaatgcagagtcag

SEQ ID NO: 2384 - RNA, 20 nt, synthetic construct
  misc_feature 1..20: note = source = /note="Description of Artificial Sequence: Synthetic oligonucleotide"
  source 1..20: mol_type = other RNA
gctcagtgataacattaaaa

SEQ ID NO: 2385 - RNA, 20 nt, synthetic construct
  misc_feature 1..20: note = source = /note="Description of Artificial Sequence: Synthetic oligonucleotide"
  source 1..20: mol_type = other RNA
aaatctcagtcattaataca

SEQ ID NO: 2386 - RNA, 20 nt, synthetic construct
  misc_feature 1..20: note = source = /note="Description of Artificial Sequence: Synthetic oligonucleotide"
  source 1..20: mol_type = other RNA
tctcagtcattaatacatgg

SEQ ID NO: 2387 - RNA, 20 nt, synthetic construct
  misc_feature 1..20: note = source = /note="Description of Artificial Sequence: Synthetic oligonucleotide"
  source 1..20: mol_type = other RNA
tattacatgcctgtgcttct

SEQ ID NO: 2388 - RNA, 20 nt, synthetic construct
  misc_feature 1..20: note = source = /note="Description of Artificial Sequence: Synthetic oligonucleotide"
  source 1..20: mol_type = other RNA
ttatctttttttgttttacc

SEQ ID NO: 2389 - RNA, 20 nt, synthetic construct
  misc_feature 1..20: note = source = /note="Description of Artificial Sequence: Synthetic oligonucleotide"
  source 1..20: mol_type = other RNA
aatattctccatgatctcca

SEQ ID NO: 2390 - RNA, 20 nt, synthetic construct
  misc_feature 1..20: note = source = /note="Description of Artificial Sequence: Synthetic oligonucleotide"
  source 1..20: mol_type = other RNA
tatcatttttttttttttct

SEQ ID NO: 2391 - RNA, 20 nt, synthetic construct
  misc_feature 1..20: note = source = /note="Description of Artificial Sequence: Synthetic oligonucleotide"
  source 1..20: mol_type = other RNA
acagtctcactctgttgccc

SEQ ID NO: 2392 - RNA, 20 nt, synthetic construct
  misc_feature 1..20: note = source = /note="Description of Artificial Sequence: Synthetic oligonucleotide"
  source 1..20: mol_type = other RNA
tctcactctgttgcccaggc

SEQ ID NO: 2393 - RNA, 20 nt, synthetic construct
  misc_feature 1..20: note = source = /note="Description of Artificial Sequence: Synthetic oligonucleotide"
  source 1..20: mol_type = other RNA
ctcactctgttgcccaggct

SEQ ID NO: 2394 - RNA, 20 nt, synthetic construct
  misc_feature 1..20: note = source = /note="Description of Artificial Sequence: Synthetic oligonucleotide"
  source 1..20: mol_type = other RNA
attctcctgcctcagcctgc

SEQ ID NO: 2395 - RNA, 20 nt, synthetic construct
  misc_feature 1..20: note = source = /note="Description of Artificial Sequence: Synthetic oligonucleotide"
  source 1..20: mol_type = other RNA
ttctcctgcctcagcctgcc

SEQ ID NO: 2396 - RNA, 20 nt, synthetic construct
  misc_feature 1..20: note = source = /note="Description of Artificial Sequence: Synthetic oligonucleotide"
  source 1..20: mol_type = other RNA
tgccgggtagctagaattac

SEQ ID NO: 2397 - RNA, 20 nt, synthetic construct
  misc_feature 1..20: note = source = /note="Description of Artificial Sequence: Synthetic oligonucleotide"
  source 1..20: mol_type = other RNA
caggcatgtgccaccacacc

SEQ ID NO: 2398 - RNA, 20 nt, synthetic construct
  misc_feature 1..20: note = source = /note="Description of Artificial Sequence: Synthetic oligonucleotide"
  source 1..20: mol_type = other RNA
tctgtatttttagtagagac

SEQ ID NO: 2399 - RNA, 20 nt, synthetic construct
  misc_feature 1..20: note = source = /note="Description of Artificial Sequence: Synthetic oligonucleotide"
  source 1..20: mol_type = other RNA
ctgtatttttagtagagaca

SEQ ID NO: 2400 - RNA, 20 nt, synthetic construct
  misc_feature 1..20: note = source = /note="Description of Artificial Sequence: Synthetic oligonucleotide"
  source 1..20: mol_type = other RNA
gagacagggtttcacgatgt

SEQ ID NO: 2401 - RNA, 20 nt, synthetic construct
  misc_feature 1..20: note = source = /note="Description of Artificial Sequence: Synthetic oligonucleotide"
  source 1..20: mol_type = other RNA
tttcacgatgttggccagac

SEQ ID NO: 2402 - RNA, 20 nt, synthetic construct
  misc_feature 1..20: note = source = /note="Description of Artificial Sequence: Synthetic oligonucleotide"
  source 1..20: mol_type = other RNA
ggtcttgaactcctgacctc

SEQ ID NO: 2403 - RNA, 20 nt, synthetic construct
  misc_feature 1..20: note = source = /note="Description of Artificial Sequence: Synthetic oligonucleotide"
  source 1..20: mol_type = other RNA
accgcagcctcccaaagtgc

SEQ ID NO: 2404 - RNA, 20 nt, synthetic construct
  misc_feature 1..20: note = source = /note="Description of Artificial Sequence: Synthetic oligonucleotide"
  source 1..20: mol_type = other RNA
tcccaaagtgctggaattac

SEQ ID NO: 2405 - RNA, 20 nt, synthetic construct
  misc_feature 1..20: note = source = /note="Description of Artificial Sequence: Synthetic oligonucleotide"
  source 1..20: mol_type = other RNA
gtgctggaattacaggcgtg

SEQ ID NO: 2406 - RNA, 20 nt, synthetic construct
  misc_feature 1..20: note = source = /note="Description of Artificial Sequence: Synthetic oligonucleotide"
  source 1..20: mol_type = other RNA
caggcgtgaggcactgcatc

SEQ ID NO: 2407 - RNA, 20 nt, synthetic construct
  misc_feature 1..20: note = source = /note="Description of Artificial Sequence: Synthetic oligonucleotide"
  source 1..20: mol_type = other RNA
gctacgatctatatactcct

SEQ ID NO: 2408 - RNA, 20 nt, synthetic construct
  misc_feature 1..20: note = source = /note="Description of Artificial Sequence: Synthetic oligonucleotide"
  source 1..20: mol_type = other RNA
tgtgtgtgtctgtatagtag

SEQ ID NO: 2409 - RNA, 20 nt, synthetic construct
  misc_feature 1..20: note = source = /note="Description of Artificial Sequence: Synthetic oligonucleotide"
  source 1..20: mol_type = other RNA
tagtcacaatatgctttttg

SEQ ID NO: 2410 - RNA, 20 nt, synthetic construct
  misc_feature 1..20: note = source = /note="Description of Artificial Sequence: Synthetic oligonucleotide"
  source 1..20: mol_type = other RNA
tttgaggattttccttttcc

SEQ ID NO: 2411 - RNA, 20 nt, synthetic construct
  misc_feature 1..20: note = source = /note="Description of Artificial Sequence: Synthetic oligonucleotide"
  source 1..20: mol_type = other RNA
ttgaggattttccttttcct

SEQ ID NO: 2412 - RNA, 20 nt, synthetic construct
  misc_feature 1..20: note = source = /note="Description of Artificial Sequence: Synthetic oligonucleotide"
  source 1..20: mol_type = other RNA
ctcttccatcttagaagagc

SEQ ID NO: 2413 - RNA, 20 nt, synthetic construct
  misc_feature 1..20: note = source = /note="Description of Artificial Sequence: Synthetic oligonucleotide"
  source 1..20: mol_type = other RNA
aaccgactcttcttttatct

SEQ ID NO: 2414 - RNA, 20 nt, synthetic construct
  misc_feature 1..20: note = source = /note="Description of Artificial Sequence: Synthetic oligonucleotide"
  source 1..20: mol_type = other RNA
tcttggtttctacaacacag

SEQ ID NO: 2415 - RNA, 20 nt, synthetic construct
  misc_feature 1..20: note = source = /note="Description of Artificial Sequence: Synthetic oligonucleotide"
  source 1..20: mol_type = other RNA
actttaatcccttttaacac

SEQ ID NO: 2416 - RNA, 20 nt, synthetic construct
  misc_feature 1..20: note = source = /note="Description of Artificial Sequence: Synthetic oligonucleotide"
  source 1..20: mol_type = other RNA
aaaatctagcaaataaaaaa

SEQ ID NO: 2417 - RNA, 20 nt, synthetic construct
  misc_feature 1..20: note = source = /note="Description of Artificial Sequence: Synthetic oligonucleotide"
  source 1..20: mol_type = other RNA
attatgatatgcttattcat

SEQ ID NO: 2418 - RNA, 20 nt, synthetic construct
  misc_feature 1..20: note = source = /note="Description of Artificial Sequence: Synthetic oligonucleotide"
  source 1..20: mol_type = other RNA
gcaatagtgtagccccttct

SEQ ID NO: 2419 - RNA, 20 nt, synthetic construct
  misc_feature 1..20: note = source = /note="Description of Artificial Sequence: Synthetic oligonucleotide"
  source 1..20: mol_type = other RNA
ttgttataaaaatactcatt

SEQ ID NO: 2420 - RNA, 20 nt, synthetic construct
  misc_feature 1..20: note = source = /note="Description of Artificial Sequence: Synthetic oligonucleotide"
  source 1..20: mol_type = other RNA
ttatactactttctttattt

SEQ ID NO: 2421 - RNA, 20 nt, synthetic construct
  misc_feature 1..20: note = source = /note="Description of Artificial Sequence: Synthetic oligonucleotide"
  source 1..20: mol_type = other RNA
tatactactttctttattta

SEQ ID NO: 2422 - RNA, 20 nt, synthetic construct
  misc_feature 1..20: note = source = /note="Description of Artificial Sequence: Synthetic oligonucleotide"
  source 1..20: mol_type = other RNA
actactttctttatttaggg

SEQ ID NO: 2423 - RNA, 20 nt, synthetic construct
  misc_feature 1..20: note = source = /note="Description of Artificial Sequence: Synthetic oligonucleotide"
  source 1..20: mol_type = other RNA
gtatttaaattctgttatct

SEQ ID NO: 2424 - RNA, 20 nt, synthetic construct
  misc_feature 1..20: note = source = /note="Description of Artificial Sequence: Synthetic oligonucleotide"
  source 1..20: mol_type = other RNA
tttccctatcatttgttctc

SEQ ID NO: 2425 - RNA, 20 nt, synthetic construct
  misc_feature 1..20: note = source = /note="Description of Artificial Sequence: Synthetic oligonucleotide"
  source 1..20: mol_type = other RNA
catttttttccagtgacaaa

SEQ ID NO: 2426 - RNA, 20 nt, synthetic construct
  misc_feature 1..20: note = source = /note="Description of Artificial Sequence: Synthetic oligonucleotide"
  source 1..20: mol_type = other RNA
tgcaaacaaccagagctgat

SEQ ID NO: 2427 - RNA, 20 nt, synthetic construct
  misc_feature 1..20: note = source = /note="Description of Artificial Sequence: Synthetic oligonucleotide"
  source 1..20: mol_type = other RNA
aaccagagctgataggcagc

SEQ ID NO: 2428 - RNA, 20 nt, synthetic construct
  misc_feature 1..20: note = source = /note="Description of Artificial Sequence: Synthetic oligonucleotide"
  source 1..20: mol_type = other RNA
gcagcaggtgcacatgagtg

SEQ ID NO: 2429 - RNA, 20 nt, synthetic construct
  misc_feature 1..20: note = source = /note="Description of Artificial Sequence: Synthetic oligonucleotide"
  source 1..20: mol_type = other RNA
catgagtgtggctgtgctga

SEQ ID NO: 2430 - RNA, 20 nt, synthetic construct
  misc_feature 1..20: note = source = /note="Description of Artificial Sequence: Synthetic oligonucleotide"
  source 1..20: mol_type = other RNA
tggttactgaaagatttcca

SEQ ID NO: 2431 - RNA, 20 nt, synthetic construct
  misc_feature 1..20: note = source = /note="Description of Artificial Sequence: Synthetic oligonucleotide"
  source 1..20: mol_type = other RNA
gctccttccccattactccc

SEQ ID NO: 2432 - RNA, 20 nt, synthetic construct
  misc_feature 1..20: note = source = /note="Description of Artificial Sequence: Synthetic oligonucleotide"
  source 1..20: mol_type = other RNA
ctccttccccattactccct

SEQ ID NO: 2433 - RNA, 20 nt, synthetic construct
  misc_feature 1..20: note = source = /note="Description of Artificial Sequence: Synthetic oligonucleotide"
  source 1..20: mol_type = other RNA
cctgcagctagaataataaa

SEQ ID NO: 2434 - RNA, 20 nt, synthetic construct
  misc_feature 1..20: note = source = /note="Description of Artificial Sequence: Synthetic oligonucleotide"
  source 1..20: mol_type = other RNA
tagaataataaatggcatgt

SEQ ID NO: 2435 - RNA, 20 nt, synthetic construct
  misc_feature 1..20: note = source = /note="Description of Artificial Sequence: Synthetic oligonucleotide"
  source 1..20: mol_type = other RNA
aatggcatgtaggttcctct

SEQ ID NO: 2436 - RNA, 20 nt, synthetic construct
  misc_feature 1..20: note = source = /note="Description of Artificial Sequence: Synthetic oligonucleotide"
  source 1..20: mol_type = other RNA
ccagcactatgtctcatgcc

SEQ ID NO: 2437 - RNA, 20 nt, synthetic construct
  misc_feature 1..20: note = source = /note="Description of Artificial Sequence: Synthetic oligonucleotide"
  source 1..20: mol_type = other RNA
ttttgattatcactcctgtg

SEQ ID NO: 2438 - RNA, 20 nt, synthetic construct
  misc_feature 1..20: note = source = /note="Description of Artificial Sequence: Synthetic oligonucleotide"
  source 1..20: mol_type = other RNA
attatcactcctgtgtggta

SEQ ID NO: 2439 - RNA, 20 nt, synthetic construct
  misc_feature 1..20: note = source = /note="Description of Artificial Sequence: Synthetic oligonucleotide"
  source 1..20: mol_type = other RNA
ttatcactcctgtgtggtaa

SEQ ID NO: 2440 - RNA, 20 nt, synthetic construct
  misc_feature 1..20: note = source = /note="Description of Artificial Sequence: Synthetic oligonucleotide"
  source 1..20: mol_type = other RNA
tagtttgtttttaacaaacc

SEQ ID NO: 2441 - RNA, 20 nt, synthetic construct
  misc_feature 1..20: note = source = /note="Description of Artificial Sequence: Synthetic oligonucleotide"
  source 1..20: mol_type = other RNA
ttagagaatattgttactga

SEQ ID NO: 2442 - RNA, 20 nt, synthetic construct
  misc_feature 1..20: note = source = /note="Description of Artificial Sequence: Synthetic oligonucleotide"
  source 1..20: mol_type = other RNA
ctttaaaccttagctcatat

SEQ ID NO: 2443 - RNA, 20 nt, synthetic construct
  misc_feature 1..20: note = source = /note="Description of Artificial Sequence: Synthetic oligonucleotide"
  source 1..20: mol_type = other RNA
catccttagatgaagatatt

SEQ ID NO: 2444 - RNA, 20 nt, synthetic construct
  misc_feature 1..20: note = source = /note="Description of Artificial Sequence: Synthetic oligonucleotide"
  source 1..20: mol_type = other RNA
atccttagatgaagatattt

SEQ ID NO: 2445 - RNA, 20 nt, synthetic construct
  misc_feature 1..20: note = source = /note="Description of Artificial Sequence: Synthetic oligonucleotide"
  source 1..20: mol_type = other RNA
tccattttgaagaaattgta

SEQ ID NO: 2446 - RNA, 20 nt, synthetic construct
  misc_feature 1..20: note = source = /note="Description of Artificial Sequence: Synthetic oligonucleotide"
  source 1..20: mol_type = other RNA
ttttgaagaaattgtaaggt

SEQ ID NO: 2447 - RNA, 20 nt, synthetic construct
  misc_feature 1..20: note = source = /note="Description of Artificial Sequence: Synthetic oligonucleotide"
  source 1..20: mol_type = other RNA
tttgaagaaattgtaaggta

SEQ ID NO: 2448 - RNA, 20 nt, synthetic construct
  misc_feature 1..20: note = source = /note="Description of Artificial Sequence: Synthetic oligonucleotide"
  source 1..20: mol_type = other RNA
aaaatcatttttaaaatatc

SEQ ID NO: 2449 - RNA, 20 nt, synthetic construct
  misc_feature 1..20: note = source = /note="Description of Artificial Sequence: Synthetic oligonucleotide"
  source 1..20: mol_type = other RNA
aaatcatttttaaaatatct

SEQ ID NO: 2450 - RNA, 20 nt, synthetic construct
  misc_feature 1..20: note = source = /note="Description of Artificial Sequence: Synthetic oligonucleotide"
  source 1..20: mol_type = other RNA
tctgggttaatgctatagat

SEQ ID NO: 2451 - RNA, 20 nt, synthetic construct
  misc_feature 1..20: note = source = /note="Description of Artificial Sequence: Synthetic oligonucleotide"
  source 1..20: mol_type = other RNA
gtttattgatcctcaatctg

SEQ ID NO: 2452 - RNA, 20 nt, synthetic construct
  misc_feature 1..20: note = source = /note="Description of Artificial Sequence: Synthetic oligonucleotide"
  source 1..20: mol_type = other RNA
caatctgtggctgttttaaa

SEQ ID NO: 2453 - RNA, 20 nt, synthetic construct
  misc_feature 1..20: note = source = /note="Description of Artificial Sequence: Synthetic oligonucleotide"
  source 1..20: mol_type = other RNA
agttcagtctaagagaacca

SEQ ID NO: 2454 - RNA, 20 nt, synthetic construct
  misc_feature 1..20: note = source = /note="Description of Artificial Sequence: Synthetic oligonucleotide"
  source 1..20: mol_type = other RNA
atattaaattactaaatata

SEQ ID NO: 2455 - RNA, 20 nt, synthetic construct
  misc_feature 1..20: note = source = /note="Description of Artificial Sequence: Synthetic oligonucleotide"
  source 1..20: mol_type = other RNA
atatattgtaaaaattgctt

SEQ ID NO: 2456 - RNA, 20 nt, synthetic construct
  misc_feature 1..20: note = source = /note="Description of Artificial Sequence: Synthetic oligonucleotide"
  source 1..20: mol_type = other RNA
ggaatcaataataagtattg

SEQ ID NO: 2457 - RNA, 20 nt, synthetic construct
  misc_feature 1..20: note = source = /note="Description of Artificial Sequence: Synthetic oligonucleotide"
  source 1..20: mol_type = other RNA
tagttatatattacaatgta

SEQ ID NO: 2458 - RNA, 20 nt, synthetic construct
  misc_feature 1..20: note = source = /note="Description of Artificial Sequence: Synthetic oligonucleotide"
  source 1..20: mol_type = other RNA
agttatatattacaatgtaa

SEQ ID NO: 2459 - RNA, 20 nt, synthetic construct
  misc_feature 1..20: note = source = /note="Description of Artificial Sequence: Synthetic oligonucleotide"
  source 1..20: mol_type = other RNA
attcgatagtatctaaatca

SEQ ID NO: 2460 - RNA, 20 nt, synthetic construct
  misc_feature 1..20: note = source = /note="Description of Artificial Sequence: Synthetic oligonucleotide"
  source 1..20: mol_type = other RNA
gaatcataaaaccttaaagc

SEQ ID NO: 2461 - RNA, 20 nt, synthetic construct
  misc_feature 1..20: note = source = /note="Description of Artificial Sequence: Synthetic oligonucleotide"
  source 1..20: mol_type = other RNA
aatcataaaaccttaaagct

SEQ ID NO: 2462 - RNA, 20 nt, synthetic construct
  misc_feature 1..20: note = source = /note="Description of Artificial Sequence: Synthetic oligonucleotide"
  source 1..20: mol_type = other RNA
ataaaaccttaaagctgggt

SEQ ID NO: 2463 - RNA, 20 nt, synthetic construct
  misc_feature 1..20: note = source = /note="Description of Artificial Sequence: Synthetic oligonucleotide"
  source 1..20: mol_type = other RNA
aatacaatttaacatcttat

SEQ ID NO: 2464 - RNA, 20 nt, synthetic construct
  misc_feature 1..20: note = source = /note="Description of Artificial Sequence: Synthetic oligonucleotide"
  source 1..20: mol_type = other RNA
cctcagtttccctaagtgat

SEQ ID NO: 2465 - RNA, 20 nt, synthetic construct
  misc_feature 1..20: note = source = /note="Description of Artificial Sequence: Synthetic oligonucleotide"
  source 1..20: mol_type = other RNA
ggctcaagatcatgaattta

SEQ ID NO: 2466 - RNA, 20 nt, synthetic construct
  misc_feature 1..20: note = source = /note="Description of Artificial Sequence: Synthetic oligonucleotide"
  source 1..20: mol_type = other RNA
tcaagatcatgaatttatgg

SEQ ID NO: 2467 - RNA, 20 nt, synthetic construct
  misc_feature 1..20: note = source = /note="Description of Artificial Sequence: Synthetic oligonucleotide"
  source 1..20: mol_type = other RNA
ctacccccttagtttgcctg

SEQ ID NO: 2468 - RNA, 20 nt, synthetic construct
  misc_feature 1..20: note = source = /note="Description of Artificial Sequence: Synthetic oligonucleotide"
  source 1..20: mol_type = other RNA
tacccccttagtttgcctgt

SEQ ID NO: 2469 - RNA, 20 nt, synthetic construct
  misc_feature 1..20: note = source = /note="Description of Artificial Sequence: Synthetic oligonucleotide"
  source 1..20: mol_type = other RNA
ttagtttgcctgtgggttta

SEQ ID NO: 2470 - RNA, 20 nt, synthetic construct
  misc_feature 1..20: note = source = /note="Description of Artificial Sequence: Synthetic oligonucleotide"
  source 1..20: mol_type = other RNA
tgtgggtttatggaagttac

SEQ ID NO: 2471 - RNA, 20 nt, synthetic construct
  misc_feature 1..20: note = source = /note="Description of Artificial Sequence: Synthetic oligonucleotide"
  source 1..20: mol_type = other RNA
atactacttgaaatttctag

SEQ ID NO: 2472 - RNA, 20 nt, synthetic construct
  misc_feature 1..20: note = source = /note="Description of Artificial Sequence: Synthetic oligonucleotide"
  source 1..20: mol_type = other RNA
tactacttgaaatttctagc

SEQ ID NO: 2473 - RNA, 20 nt, synthetic construct
  misc_feature 1..20: note = source = /note="Description of Artificial Sequence: Synthetic oligonucleotide"
  source 1..20: mol_type = other RNA
actacttgaaatttctagcg

SEQ ID NO: 2474 - RNA, 20 nt, synthetic construct
  misc_feature 1..20: note = source = /note="Description of Artificial Sequence: Synthetic oligonucleotide"
  source 1..20: mol_type = other RNA
gcggggatctctaaaatgcc

SEQ ID NO: 2475 - RNA, 20 nt, synthetic construct
  misc_feature 1..20: note = source = /note="Description of Artificial Sequence: Synthetic oligonucleotide"
  source 1..20: mol_type = other RNA
ctctaaaatgcctggatgtt

SEQ ID NO: 2476 - RNA, 20 nt, synthetic construct
  misc_feature 1..20: note = source = /note="Description of Artificial Sequence: Synthetic oligonucleotide"
  source 1..20: mol_type = other RNA
aaatgcctggatgttaggaa

SEQ ID NO: 2477 - RNA, 20 nt, synthetic construct
  misc_feature 1..20: note = source = /note="Description of Artificial Sequence: Synthetic oligonucleotide"
  source 1..20: mol_type = other RNA
aattatattttctattttag

SEQ ID NO: 2478 - RNA, 20 nt, synthetic construct
  misc_feature 1..20: note = source = /note="Description of Artificial Sequence: Synthetic oligonucleotide"
  source 1..20: mol_type = other RNA
aaataaaccatacccttaag

SEQ ID NO: 2479 - RNA, 20 nt, synthetic construct
  misc_feature 1..20: note = source = /note="Description of Artificial Sequence: Synthetic oligonucleotide"
  source 1..20: mol_type = other RNA
attttgagcacatccttcat

SEQ ID NO: 2480 - RNA, 20 nt, synthetic construct
  misc_feature 1..20: note = source = /note="Description of Artificial Sequence: Synthetic oligonucleotide"
  source 1..20: mol_type = other RNA
ggcccagtctctgaccagtg

SEQ ID NO: 2481 - RNA, 20 nt, synthetic construct
  misc_feature 1..20: note = source = /note="Description of Artificial Sequence: Synthetic oligonucleotide"
  source 1..20: mol_type = other RNA
attttctgtgtgatgtttat

SEQ ID NO: 2482 - RNA, 20 nt, synthetic construct
  misc_feature 1..20: note = source = /note="Description of Artificial Sequence: Synthetic oligonucleotide"
  source 1..20: mol_type = other RNA
ttttctgtgtgatgtttata

SEQ ID NO: 2483 - RNA, 20 nt, synthetic construct
  misc_feature 1..20: note = source = /note="Description of Artificial Sequence: Synthetic oligonucleotide"
  source 1..20: mol_type = other RNA
ttctgaaatgttttccatct

SEQ ID NO: 2484 - RNA, 20 nt, synthetic construct
  misc_feature 1..20: note = source = /note="Description of Artificial Sequence: Synthetic oligonucleotide"
  source 1..20: mol_type = other RNA
tcataacttctttttatttt

SEQ ID NO: 2485 - RNA, 20 nt, synthetic construct
  misc_feature 1..20: note = source = /note="Description of Artificial Sequence: Synthetic oligonucleotide"
  source 1..20: mol_type = other RNA
acctctcatgttccagtgtt

SEQ ID NO: 2486 - RNA, 20 nt, synthetic construct
  misc_feature 1..20: note = source = /note="Description of Artificial Sequence: Synthetic oligonucleotide"
  source 1..20: mol_type = other RNA
taaataatcactttgtataa

SEQ ID NO: 2487 - RNA, 20 nt, synthetic construct
  misc_feature 1..20: note = source = /note="Description of Artificial Sequence: Synthetic oligonucleotide"
  source 1..20: mol_type = other RNA
tatgttaaattgtttataac

SEQ ID NO: 2488 - RNA, 20 nt, synthetic construct
  misc_feature 1..20: note = source = /note="Description of Artificial Sequence: Synthetic oligonucleotide"
  source 1..20: mol_type = other RNA
gttaaattgtttataactgg

SEQ ID NO: 2489 - RNA, 20 nt, synthetic construct
  misc_feature 1..20: note = source = /note="Description of Artificial Sequence: Synthetic oligonucleotide"
  source 1..20: mol_type = other RNA
gttgatatttcagccttgtt

SEQ ID NO: 2490 - RNA, 20 nt, synthetic construct
  misc_feature 1..20: note = source = /note="Description of Artificial Sequence: Synthetic oligonucleotide"
  source 1..20: mol_type = other RNA
taattagaaacaacctcata

SEQ ID NO: 2491 - RNA, 20 nt, synthetic construct
  misc_feature 1..20: note = source = /note="Description of Artificial Sequence: Synthetic oligonucleotide"
  source 1..20: mol_type = other RNA
tatgcttgtttttatcttca

SEQ ID NO: 2492 - RNA, 20 nt, synthetic construct
  misc_feature 1..20: note = source = /note="Description of Artificial Sequence: Synthetic oligonucleotide"
  source 1..20: mol_type = other RNA
gcaaacactgagttctttac

SEQ ID NO: 2493 - RNA, 20 nt, synthetic construct
  misc_feature 1..20: note = source = /note="Description of Artificial Sequence: Synthetic oligonucleotide"
  source 1..20: mol_type = other RNA
caaacactgagttctttact

SEQ ID NO: 2494 - RNA, 20 nt, synthetic construct
  misc_feature 1..20: note = source = /note="Description of Artificial Sequence: Synthetic oligonucleotide"
  source 1..20: mol_type = other RNA
gtcaccactttgtctatgtt

SEQ ID NO: 2495 - RNA, 20 nt, synthetic construct
  misc_feature 1..20: note = source = /note="Description of Artificial Sequence: Synthetic oligonucleotide"
  source 1..20: mol_type = other RNA
accactttgtctatgttagg

SEQ ID NO: 2496 - RNA, 20 nt, synthetic construct
  misc_feature 1..20: note = source = /note="Description of Artificial Sequence: Synthetic oligonucleotide"
  source 1..20: mol_type = other RNA
ttgtctatgttaggaggagc

SEQ ID NO: 2497 - RNA, 20 nt, synthetic construct
  misc_feature 1..20: note = source = /note="Description of Artificial Sequence: Synthetic oligonucleotide"
  source 1..20: mol_type = other RNA
gcaggaagtgaatacattta

SEQ ID NO: 2498 - RNA, 20 nt, synthetic construct
  misc_feature 1..20: note = source = /note="Description of Artificial Sequence: Synthetic oligonucleotide"
  source 1..20: mol_type = other RNA
taaaactttgactactgtag

SEQ ID NO: 2499 - RNA, 20 nt, synthetic construct
  misc_feature 1..20: note = source = /note="Description of Artificial Sequence: Synthetic oligonucleotide"
  source 1..20: mol_type = other RNA
tggttttttaaagcattaac

SEQ ID NO: 2500 - RNA, 20 nt, synthetic construct
  misc_feature 1..20: note = source = /note="Description of Artificial Sequence: Synthetic oligonucleotide"
  source 1..20: mol_type = other RNA
ctgaaatagcacttcccttt

SEQ ID NO: 2501 - RNA, 20 nt, synthetic construct
  misc_feature 1..20: note = source = /note="Description of Artificial Sequence: Synthetic oligonucleotide"
  source 1..20: mol_type = other RNA
ccctttaggcactgtacagt

SEQ ID NO: 2502 - RNA, 20 nt, synthetic construct
  misc_feature 1..20: note = source = /note="Description of Artificial Sequence: Synthetic oligonucleotide"
  source 1..20: mol_type = other RNA
ggaatcatttacttgcagag

SEQ ID NO: 2503 - RNA, 20 nt, synthetic construct
  misc_feature 1..20: note = source = /note="Description of Artificial Sequence: Synthetic oligonucleotide"
  source 1..20: mol_type = other RNA
gtactcatgtgtataagaat

SEQ ID NO: 2504 - RNA, 20 nt, synthetic construct
  misc_feature 1..20: note = source = /note="Description of Artificial Sequence: Synthetic oligonucleotide"
  source 1..20: mol_type = other RNA
agaataggagaaacactttg

SEQ ID NO: 2505 - RNA, 20 nt, synthetic construct
  misc_feature 1..20: note = source = /note="Description of Artificial Sequence: Synthetic oligonucleotide"
  source 1..20: mol_type = other RNA
gaataggagaaacactttgt

SEQ ID NO: 2506 - RNA, 20 nt, synthetic construct
  misc_feature 1..20: note = source = /note="Description of Artificial Sequence: Synthetic oligonucleotide"
  source 1..20: mol_type = other RNA
tttgtgggcatatcctgctg

SEQ ID NO: 2507 - RNA, 20 nt, synthetic construct
  misc_feature 1..20: note = source = /note="Description of Artificial Sequence: Synthetic oligonucleotide"
  source 1..20: mol_type = other RNA
agtctcatcccatttaaacc

SEQ ID NO: 2508 - RNA, 20 nt, synthetic construct
  misc_feature 1..20: note = source = /note="Description of Artificial Sequence: Synthetic oligonucleotide"
  source 1..20: mol_type = other RNA
ctcatcccatttaaacctgg

SEQ ID NO: 2509 - RNA, 20 nt, synthetic construct
  misc_feature 1..20: note = source = /note="Description of Artificial Sequence: Synthetic oligonucleotide"
  source 1..20: mol_type = other RNA
agccaaagcagcatttcaac

SEQ ID NO: 2510 - RNA, 20 nt, synthetic construct
  misc_feature 1..20: note = source = /note="Description of Artificial Sequence: Synthetic oligonucleotide"
  source 1..20: mol_type = other RNA
aaagcagcatttcaacagga

SEQ ID NO: 2511 - RNA, 20 nt, synthetic construct
  misc_feature 1..20: note = source = /note="Description of Artificial Sequence: Synthetic oligonucleotide"
  source 1..20: mol_type = other RNA
aggaaggaaacatctattac

SEQ ID NO: 2512 - RNA, 20 nt, synthetic construct
  misc_feature 1..20: note = source = /note="Description of Artificial Sequence: Synthetic oligonucleotide"
  source 1..20: mol_type = other RNA
ggaaggaaacatctattact

SEQ ID NO: 2513 - RNA, 20 nt, synthetic construct
  misc_feature 1..20: note = source = /note="Description of Artificial Sequence: Synthetic oligonucleotide"
  source 1..20: mol_type = other RNA
gaaggaaacatctattactg

SEQ ID NO: 2514 - RNA, 20 nt, synthetic construct
  misc_feature 1..20: note = source = /note="Description of Artificial Sequence: Synthetic oligonucleotide"
  source 1..20: mol_type = other RNA
tttgaagaaacatgccatga

SEQ ID NO: 2515 - RNA, 20 nt, synthetic construct
  misc_feature 1..20: note = source = /note="Description of Artificial Sequence: Synthetic oligonucleotide"
  source 1..20: mol_type = other RNA
aaggtgtactaatatcacaa

SEQ ID NO: 2516 - RNA, 20 nt, synthetic construct
  misc_feature 1..20: note = source = /note="Description of Artificial Sequence: Synthetic oligonucleotide"
  source 1..20: mol_type = other RNA
aggtgtactaatatcacaaa

SEQ ID NO: 2517 - RNA, 20 nt, synthetic construct
  misc_feature 1..20: note = source = /note="Description of Artificial Sequence: Synthetic oligonucleotide"
  source 1..20: mol_type = other RNA
gtactaatatcacaaaggga

SEQ ID NO: 2518 - RNA, 20 nt, synthetic construct
  misc_feature 1..20: note = source = /note="Description of Artificial Sequence: Synthetic oligonucleotide"
  source 1..20: mol_type = other RNA
tactaatatcacaaagggaa

SEQ ID NO: 2519 - RNA, 20 nt, synthetic construct
  misc_feature 1..20: note = source = /note="Description of Artificial Sequence: Synthetic oligonucleotide"
  source 1..20: mol_type = other RNA
aatatcacaaagggaaggga

SEQ ID NO: 2520 - RNA, 20 nt, synthetic construct
  misc_feature 1..20: note = source = /note="Description of Artificial Sequence: Synthetic oligonucleotide"
  source 1..20: mol_type = other RNA
acaaagtcccttttttgtaa

SEQ ID NO: 2521 - RNA, 20 nt, synthetic construct
  misc_feature 1..20: note = source = /note="Description of Artificial Sequence: Synthetic oligonucleotide"
  source 1..20: mol_type = other RNA
gtttgatgatgtttgatcaa

SEQ ID NO: 2522 - RNA, 20 nt, synthetic construct
  misc_feature 1..20: note = source = /note="Description of Artificial Sequence: Synthetic oligonucleotide"
  source 1..20: mol_type = other RNA
tgatgatgtttgatcaatgg

SEQ ID NO: 2523 - RNA, 20 nt, synthetic construct
  misc_feature 1..20: note = source = /note="Description of Artificial Sequence: Synthetic oligonucleotide"
  source 1..20: mol_type = other RNA
tggtggatctatctcttgaa

SEQ ID NO: 2524 - RNA, 20 nt, synthetic construct
  misc_feature 1..20: note = source = /note="Description of Artificial Sequence: Synthetic oligonucleotide"
  source 1..20: mol_type = other RNA
aaatgcatttaaaccccaaa

SEQ ID NO: 2525 - RNA, 20 nt, synthetic construct
  misc_feature 1..20: note = source = /note="Description of Artificial Sequence: Synthetic oligonucleotide"
  source 1..20: mol_type = other RNA
tgcatttaaaccccaaatgg

SEQ ID NO: 2526 - RNA, 20 nt, synthetic construct
  misc_feature 1..20: note = source = /note="Description of Artificial Sequence: Synthetic oligonucleotide"
  source 1..20: mol_type = other RNA
aaatggaggattcttatata

SEQ ID NO: 2527 - RNA, 20 nt, synthetic construct
  misc_feature 1..20: note = source = /note="Description of Artificial Sequence: Synthetic oligonucleotide"
  source 1..20: mol_type = other RNA
aatgatatattcatgtttat

SEQ ID NO: 2528 - RNA, 20 nt, synthetic construct
  misc_feature 1..20: note = source = /note="Description of Artificial Sequence: Synthetic oligonucleotide"
  source 1..20: mol_type = other RNA
atgtttataggtagagtgac

SEQ ID NO: 2529 - RNA, 20 nt, synthetic construct
  misc_feature 1..20: note = source = /note="Description of Artificial Sequence: Synthetic oligonucleotide"
  source 1..20: mol_type = other RNA
gtgactggtttttagagaag

SEQ ID NO: 2530 - RNA, 20 nt, synthetic construct
  misc_feature 1..20: note = source = /note="Description of Artificial Sequence: Synthetic oligonucleotide"
  source 1..20: mol_type = other RNA
acgaaaacttgtctgtctct

SEQ ID NO: 2531 - RNA, 20 nt, synthetic construct
  misc_feature 1..20: note = source = /note="Description of Artificial Sequence: Synthetic oligonucleotide"
  source 1..20: mol_type = other RNA
ctgaatctcctacaagcttg

SEQ ID NO: 2532 - RNA, 20 nt, synthetic construct
  misc_feature 1..20: note = source = /note="Description of Artificial Sequence: Synthetic oligonucleotide"
  source 1..20: mol_type = other RNA
aatctcctacaagcttgtgg

SEQ ID NO: 2533 - RNA, 20 nt, synthetic construct
  misc_feature 1..20: note = source = /note="Description of Artificial Sequence: Synthetic oligonucleotide"
  source 1..20: mol_type = other RNA
agcatgttgaataagagcac

SEQ ID NO: 2534 - RNA, 20 nt, synthetic construct
  misc_feature 1..20: note = source = /note="Description of Artificial Sequence: Synthetic oligonucleotide"
  source 1..20: mol_type = other RNA
ttgaataagagcacaggctc

SEQ ID NO: 2535 - RNA, 20 nt, synthetic construct
  misc_feature 1..20: note = source = /note="Description of Artificial Sequence: Synthetic oligonucleotide"
  source 1..20: mol_type = other RNA
aataagagcacaggctctgg

SEQ ID NO: 2536 - RNA, 20 nt, synthetic construct
  misc_feature 1..20: note = source = /note="Description of Artificial Sequence: Synthetic oligonucleotide"
  source 1..20: mol_type = other RNA
ggaggccctgccacccacaa

SEQ ID NO: 2537 - RNA, 20 nt, synthetic construct
  misc_feature 1..20: note = source = /note="Description of Artificial Sequence: Synthetic oligonucleotide"
  source 1..20: mol_type = other RNA
gaggccctgccacccacaaa

SEQ ID NO: 2538 - RNA, 20 nt, synthetic construct
  misc_feature 1..20: note = source = /note="Description of Artificial Sequence: Synthetic oligonucleotide"
  source 1..20: mol_type = other RNA
cacccacaaagggtgtgcta

SEQ ID NO: 2539 - RNA, 20 nt, synthetic construct
  misc_feature 1..20: note = source = /note="Description of Artificial Sequence: Synthetic oligonucleotide"
  source 1..20: mol_type = other RNA
cttttttttctaaatctatt

SEQ ID NO: 2540 - RNA, 20 nt, synthetic construct
  misc_feature 1..20: note = source = /note="Description of Artificial Sequence: Synthetic oligonucleotide"
  source 1..20: mol_type = other RNA
ttctaaaacacagtgagacc

SEQ ID NO: 2541 - RNA, 20 nt, synthetic construct
  misc_feature 1..20: note = source = /note="Description of Artificial Sequence: Synthetic oligonucleotide"
  source 1..20: mol_type = other RNA
cacagtgagaccaggcgcag

SEQ ID NO: 2542 - RNA, 20 nt, synthetic construct
  misc_feature 1..20: note = source = /note="Description of Artificial Sequence: Synthetic oligonucleotide"
  source 1..20: mol_type = other RNA
gcctgtaatcccagcacttt

SEQ ID NO: 2543 - RNA, 20 nt, synthetic construct
  misc_feature 1..20: note = source = /note="Description of Artificial Sequence: Synthetic oligonucleotide"
  source 1..20: mol_type = other RNA
tgtaatcccagcactttcgg

SEQ ID NO: 2544 - RNA, 20 nt, synthetic construct
  misc_feature 1..20: note = source = /note="Description of Artificial Sequence: Synthetic oligonucleotide"
  source 1..20: mol_type = other RNA
cccagcactttcggaggccg

SEQ ID NO: 2545 - RNA, 20 nt, synthetic construct
  misc_feature 1..20: note = source = /note="Description of Artificial Sequence: Synthetic oligonucleotide"
  source 1..20: mol_type = other RNA
ctttcggaggccgaggtatg

SEQ ID NO: 2546 - RNA, 20 nt, synthetic construct
  misc_feature 1..20: note = source = /note="Description of Artificial Sequence: Synthetic oligonucleotide"
  source 1..20: mol_type = other RNA
gccgaggtatgcggatcacg

SEQ ID NO: 2547 - RNA, 20 nt, synthetic construct
  misc_feature 1..20: note = source = /note="Description of Artificial Sequence: Synthetic oligonucleotide"
  source 1..20: mol_type = other RNA
ggtatgcggatcacgaggtc

SEQ ID NO: 2548 - RNA, 20 nt, synthetic construct
  misc_feature 1..20: note = source = /note="Description of Artificial Sequence: Synthetic oligonucleotide"
  source 1..20: mol_type = other RNA
tcaggagatcgagaccatcc

SEQ ID NO: 2549 - RNA, 20 nt, synthetic construct
  misc_feature 1..20: note = source = /note="Description of Artificial Sequence: Synthetic oligonucleotide"
  source 1..20: mol_type = other RNA
cgagaccatcctggctaaca

SEQ ID NO: 2550 - RNA, 20 nt, synthetic construct
  misc_feature 1..20: note = source = /note="Description of Artificial Sequence: Synthetic oligonucleotide"
  source 1..20: mol_type = other RNA
taaaaatacaaaaattagcc

SEQ ID NO: 2551 - RNA, 20 nt, synthetic construct
  misc_feature 1..20: note = source = /note="Description of Artificial Sequence: Synthetic oligonucleotide"
  source 1..20: mol_type = other RNA
atacaaaaattagccaggcg

SEQ ID NO: 2552 - RNA, 20 nt, synthetic construct
  misc_feature 1..20: note = source = /note="Description of Artificial Sequence: Synthetic oligonucleotide"
  source 1..20: mol_type = other RNA
tacaaaaattagccaggcgt

SEQ ID NO: 2553 - RNA, 20 nt, synthetic construct
  misc_feature 1..20: note = source = /note="Description of Artificial Sequence: Synthetic oligonucleotide"
  source 1..20: mol_type = other RNA
acaaaaattagccaggcgtg

SEQ ID NO: 2554 - RNA, 20 nt, synthetic construct
  misc_feature 1..20: note = source = /note="Description of Artificial Sequence: Synthetic oligonucleotide"
  source 1..20: mol_type = other RNA
caaaaattagccaggcgtgg

SEQ ID NO: 2555 - RNA, 20 nt, synthetic construct
  misc_feature 1..20: note = source = /note="Description of Artificial Sequence: Synthetic oligonucleotide"
  source 1..20: mol_type = other RNA
gcctgtaatcccagctactc

SEQ ID NO: 2556 - RNA, 20 nt, synthetic construct
  misc_feature 1..20: note = source = /note="Description of Artificial Sequence: Synthetic oligonucleotide"
  source 1..20: mol_type = other RNA
tgtaatcccagctactcagg

SEQ ID NO: 2557 - RNA, 20 nt, synthetic construct
  misc_feature 1..20: note = source = /note="Description of Artificial Sequence: Synthetic oligonucleotide"
  source 1..20: mol_type = other RNA
cccagctactcaggaggctg

SEQ ID NO: 2558 - RNA, 20 nt, synthetic construct
  misc_feature 1..20: note = source = /note="Description of Artificial Sequence: Synthetic oligonucleotide"
  source 1..20: mol_type = other RNA
gctactcaggaggctgaggc

SEQ ID NO: 2559 - RNA, 20 nt, synthetic construct
  misc_feature 1..20: note = source = /note="Description of Artificial Sequence: Synthetic oligonucleotide"
  source 1..20: mol_type = other RNA
aggaggctgaggcaggagaa

SEQ ID NO: 2560 - RNA, 20 nt, synthetic construct
  misc_feature 1..20: note = source = /note="Description of Artificial Sequence: Synthetic oligonucleotide"
  source 1..20: mol_type = other RNA
ggcaggagaatggcgtgaac

SEQ ID NO: 2561 - RNA, 20 nt, synthetic construct
  misc_feature 1..20: note = source = /note="Description of Artificial Sequence: Synthetic oligonucleotide"
  source 1..20: mol_type = other RNA
gcaggagaatggcgtgaacc

SEQ ID NO: 2562 - RNA, 20 nt, synthetic construct
  misc_feature 1..20: note = source = /note="Description of Artificial Sequence: Synthetic oligonucleotide"
  source 1..20: mol_type = other RNA
caggagaatggcgtgaaccg

SEQ ID NO: 2563 - RNA, 20 nt, synthetic construct
  misc_feature 1..20: note = source = /note="Description of Artificial Sequence: Synthetic oligonucleotide"
  source 1..20: mol_type = other RNA
gagaatggcgtgaaccgggg

SEQ ID NO: 2564 - RNA, 20 nt, synthetic construct
  misc_feature 1..20: note = source = /note="Description of Artificial Sequence: Synthetic oligonucleotide"
  source 1..20: mol_type = other RNA
aatggcgtgaaccggggagg

SEQ ID NO: 2565 - RNA, 20 nt, synthetic construct
  misc_feature 1..20: note = source = /note="Description of Artificial Sequence: Synthetic oligonucleotide"
  source 1..20: mol_type = other RNA
cgcaccactgcactccagcc

SEQ ID NO: 2566 - RNA, 20 nt, synthetic construct
  misc_feature 1..20: note = source = /note="Description of Artificial Sequence: Synthetic oligonucleotide"
  source 1..20: mol_type = other RNA
gcaccactgcactccagcct

SEQ ID NO: 2567 - RNA, 20 nt, synthetic construct
  misc_feature 1..20: note = source = /note="Description of Artificial Sequence: Synthetic oligonucleotide"
  source 1..20: mol_type = other RNA
ttataaagataaaatagaat

SEQ ID NO: 2568 - RNA, 20 nt, synthetic construct
  misc_feature 1..20: note = source = /note="Description of Artificial Sequence: Synthetic oligonucleotide"
  source 1..20: mol_type = other RNA
aatagaataggcttcaattt

SEQ ID NO: 2569 - RNA, 20 nt, synthetic construct
  misc_feature 1..20: note = source = /note="Description of Artificial Sequence: Synthetic oligonucleotide"
  source 1..20: mol_type = other RNA
atagaataggcttcaattta

SEQ ID NO: 2570 - RNA, 20 nt, synthetic construct
  misc_feature 1..20: note = source = /note="Description of Artificial Sequence: Synthetic oligonucleotide"
  source 1..20: mol_type = other RNA
ggcttcaatttagggaacaa

SEQ ID NO: 2571 - RNA, 20 nt, synthetic construct
  misc_feature 1..20: note = source = /note="Description of Artificial Sequence: Synthetic oligonucleotide"
  source 1..20: mol_type = other RNA
gaacaaaggaaaatatgttt

SEQ ID NO: 2572 - RNA, 20 nt, synthetic construct
  misc_feature 1..20: note = source = /note="Description of Artificial Sequence: Synthetic oligonucleotide"
  source 1..20: mol_type = other RNA
caaaatgattgcaactttga

SEQ ID NO: 2573 - RNA, 20 nt, synthetic construct
  misc_feature 1..20: note = source = /note="Description of Artificial Sequence: Synthetic oligonucleotide"
  source 1..20: mol_type = other RNA
ttcaattaaaaatgtagata

SEQ ID NO: 2574 - RNA, 20 nt, synthetic construct
  misc_feature 1..20: note = source = /note="Description of Artificial Sequence: Synthetic oligonucleotide"
  source 1..20: mol_type = other RNA
attaaaaatgtagatatggc

SEQ ID NO: 2575 - RNA, 20 nt, synthetic construct
  misc_feature 1..20: note = source = /note="Description of Artificial Sequence: Synthetic oligonucleotide"
  source 1..20: mol_type = other RNA
ttaaaaatgtagatatggct

SEQ ID NO: 2576 - RNA, 20 nt, synthetic construct
  misc_feature 1..20: note = source = /note="Description of Artificial Sequence: Synthetic oligonucleotide"
  source 1..20: mol_type = other RNA
aatgtagatatggctgggcg

SEQ ID NO: 2577 - RNA, 20 nt, synthetic construct
  misc_feature 1..20: note = source = /note="Description of Artificial Sequence: Synthetic oligonucleotide"
  source 1..20: mol_type = other RNA
gtagatatggctgggcgtgg

SEQ ID NO: 2578 - RNA, 20 nt, synthetic construct
  misc_feature 1..20: note = source = /note="Description of Artificial Sequence: Synthetic oligonucleotide"
  source 1..20: mol_type = other RNA
cacctgtaatcccagcactt

SEQ ID NO: 2579 - RNA, 20 nt, synthetic construct
  misc_feature 1..20: note = source = /note="Description of Artificial Sequence: Synthetic oligonucleotide"
  source 1..20: mol_type = other RNA
tgtaatcccagcactttgga

SEQ ID NO: 2580 - RNA, 20 nt, synthetic construct
  misc_feature 1..20: note = source = /note="Description of Artificial Sequence: Synthetic oligonucleotide"
  source 1..20: mol_type = other RNA
gcactttggaaggttgacgc

SEQ ID NO: 2581 - RNA, 20 nt, synthetic construct
  misc_feature 1..20: note = source = /note="Description of Artificial Sequence: Synthetic oligonucleotide"
  source 1..20: mol_type = other RNA
ctttggaaggttgacgcagg

SEQ ID NO: 2582 - RNA, 20 nt, synthetic construct
  misc_feature 1..20: note = source = /note="Description of Artificial Sequence: Synthetic oligonucleotide"
  source 1..20: mol_type = other RNA
tgacgcaggtggatcacttg

SEQ ID NO: 2583 - RNA, 20 nt, synthetic construct
  misc_feature 1..20: note = source = /note="Description of Artificial Sequence: Synthetic oligonucleotide"
  source 1..20: mol_type = other RNA
caggtggatcacttgaggtt

SEQ ID NO: 2584 - RNA, 20 nt, synthetic construct
  misc_feature 1..20: note = source = /note="Description of Artificial Sequence: Synthetic oligonucleotide"
  source 1..20: mol_type = other RNA
ttaggagtttgagacctgcc

SEQ ID NO: 2585 - RNA, 20 nt, synthetic construct
  misc_feature 1..20: note = source = /note="Description of Artificial Sequence: Synthetic oligonucleotide"
  source 1..20: mol_type = other RNA
taggagtttgagacctgcct

SEQ ID NO: 2586 - RNA, 20 nt, synthetic construct
  misc_feature 1..20: note = source = /note="Description of Artificial Sequence: Synthetic oligonucleotide"
  source 1..20: mol_type = other RNA
aaaataaacaaaaaatgtgc

SEQ ID NO: 2587 - RNA, 20 nt, synthetic construct
  misc_feature 1..20: note = source = /note="Description of Artificial Sequence: Synthetic oligonucleotide"
  source 1..20: mol_type = other RNA
aaataaacaaaaaatgtgct

SEQ ID NO: 2588 - RNA, 20 nt, synthetic construct
  misc_feature 1..20: note = source = /note="Description of Artificial Sequence: Synthetic oligonucleotide"
  source 1..20: mol_type = other RNA
aacaaaaaatgtgctgggtg

SEQ ID NO: 2589 - RNA, 20 nt, synthetic construct
  misc_feature 1..20: note = source = /note="Description of Artificial Sequence: Synthetic oligonucleotide"
  source 1..20: mol_type = other RNA
aaaaaatgtgctgggtgtgg

SEQ ID NO: 2590 - RNA, 20 nt, synthetic construct
  misc_feature 1..20: note = source = /note="Description of Artificial Sequence: Synthetic oligonucleotide"
  source 1..20: mol_type = other RNA
tgcctgtagtcctagccact

SEQ ID NO: 2591 - RNA, 20 nt, synthetic construct
  misc_feature 1..20: note = source = /note="Description of Artificial Sequence: Synthetic oligonucleotide"
  source 1..20: mol_type = other RNA
gcctgtagtcctagccactt

SEQ ID NO: 2592 - RNA, 20 nt, synthetic construct
  misc_feature 1..20: note = source = /note="Description of Artificial Sequence: Synthetic oligonucleotide"
  source 1..20: mol_type = other RNA
agccacttgggagactgaga

SEQ ID NO: 2593 - RNA, 20 nt, synthetic construct
  misc_feature 1..20: note = source = /note="Description of Artificial Sequence: Synthetic oligonucleotide"
  source 1..20: mol_type = other RNA
acttgggagactgagatgga

SEQ ID NO: 2594 - RNA, 20 nt, synthetic construct
  misc_feature 1..20: note = source = /note="Description of Artificial Sequence: Synthetic oligonucleotide"
  source 1..20: mol_type = other RNA
atggaaggatagcttgagtc

SEQ ID NO: 2595 - RNA, 20 nt, synthetic construct
  misc_feature 1..20: note = source = /note="Description of Artificial Sequence: Synthetic oligonucleotide"
  source 1..20: mol_type = other RNA
tggaaggatagcttgagtct

SEQ ID NO: 2596 - RNA, 20 nt, synthetic construct
  misc_feature 1..20: note = source = /note="Description of Artificial Sequence: Synthetic oligonucleotide"
  source 1..20: mol_type = other RNA
aaggatagcttgagtctggg

SEQ ID NO: 2597 - RNA, 20 nt, synthetic construct
  misc_feature 1..20: note = source = /note="Description of Artificial Sequence: Synthetic oligonucleotide"
  source 1..20: mol_type = other RNA
cgtgccactgcacttgagcc

SEQ ID NO: 2598 - RNA, 20 nt, synthetic construct
  misc_feature 1..20: note = source = /note="Description of Artificial Sequence: Synthetic oligonucleotide"
  source 1..20: mol_type = other RNA
gtgccactgcacttgagcct

SEQ ID NO: 2599 - RNA, 20 nt, synthetic construct
  misc_feature 1..20: note = source = /note="Description of Artificial Sequence: Synthetic oligonucleotide"
  source 1..20: mol_type = other RNA
aacaacagtagatatgtgtg

SEQ ID NO: 2600 - RNA, 20 nt, synthetic construct
  misc_feature 1..20: note = source = /note="Description of Artificial Sequence: Synthetic oligonucleotide"
  source 1..20: mol_type = other RNA
acaacagtagatatgtgtgt

SEQ ID NO: 2601 - RNA, 20 nt, synthetic construct
  misc_feature 1..20: note = source = /note="Description of Artificial Sequence: Synthetic oligonucleotide"
  source 1..20: mol_type = other RNA
gaacatttaaatgtgctcat

SEQ ID NO: 2602 - RNA, 20 nt, synthetic construct
  misc_feature 1..20: note = source = /note="Description of Artificial Sequence: Synthetic oligonucleotide"
  source 1..20: mol_type = other RNA
tttttctttaacccccttca

SEQ ID NO: 2603 - RNA, 20 nt, synthetic construct
  misc_feature 1..20: note = source = /note="Description of Artificial Sequence: Synthetic oligonucleotide"
  source 1..20: mol_type = other RNA
ttataactctcaatgtatca

SEQ ID NO: 2604 - RNA, 20 nt, synthetic construct
  misc_feature 1..20: note = source = /note="Description of Artificial Sequence: Synthetic oligonucleotide"
  source 1..20: mol_type = other RNA
tctcaatgtatcatggcaga

SEQ ID NO: 2605 - RNA, 20 nt, synthetic construct
  misc_feature 1..20: note = source = /note="Description of Artificial Sequence: Synthetic oligonucleotide"
  source 1..20: mol_type = other RNA
ttttttttttttttttgaga

SEQ ID NO: 2606 - RNA, 20 nt, synthetic construct
  misc_feature 1..20: note = source = /note="Description of Artificial Sequence: Synthetic oligonucleotide"
  source 1..20: mol_type = other RNA
ggagtctcactctgtcaccc

SEQ ID NO: 2607 - RNA, 20 nt, synthetic construct
  misc_feature 1..20: note = source = /note="Description of Artificial Sequence: Synthetic oligonucleotide"
  source 1..20: mol_type = other RNA
tctcactctgtcacccaggc

SEQ ID NO: 2608 - RNA, 20 nt, synthetic construct
  misc_feature 1..20: note = source = /note="Description of Artificial Sequence: Synthetic oligonucleotide"
  source 1..20: mol_type = other RNA
tcacccaggctggagtgcag

SEQ ID NO: 2609 - RNA, 20 nt, synthetic construct
  misc_feature 1..20: note = source = /note="Description of Artificial Sequence: Synthetic oligonucleotide"
  source 1..20: mol_type = other RNA
ttattgcaacctccgcctcc

SEQ ID NO: 2610 - RNA, 20 nt, synthetic construct
  misc_feature 1..20: note = source = /note="Description of Artificial Sequence: Synthetic oligonucleotide"
  source 1..20: mol_type = other RNA
ttgcaacctccgcctcctgg

SEQ ID NO: 2611 - RNA, 20 nt, synthetic construct
  misc_feature 1..20: note = source = /note="Description of Artificial Sequence: Synthetic oligonucleotide"
  source 1..20: mol_type = other RNA
gcctcagcctccccagtagc

SEQ ID NO: 2612 - RNA, 20 nt, synthetic construct
  misc_feature 1..20: note = source = /note="Description of Artificial Sequence: Synthetic oligonucleotide"
  source 1..20: mol_type = other RNA
cctcagcctccccagtagct

SEQ ID NO: 2613 - RNA, 20 nt, synthetic construct
  misc_feature 1..20: note = source = /note="Description of Artificial Sequence: Synthetic oligonucleotide"
  source 1..20: mol_type = other RNA
tccccagtagctgggactac

SEQ ID NO: 2614 - RNA, 20 nt, synthetic construct
  misc_feature 1..20: note = source = /note="Description of Artificial Sequence: Synthetic oligonucleotide"
  source 1..20: mol_type = other RNA
caggcttgcaccaccatgcc

SEQ ID NO: 2615 - RNA, 20 nt, synthetic construct
  misc_feature 1..20: note = source = /note="Description of Artificial Sequence: Synthetic oligonucleotide"
  source 1..20: mol_type = other RNA
ttttatatttttagtagaga

SEQ ID NO: 2616 - RNA, 20 nt, synthetic construct
  misc_feature 1..20: note = source = /note="Description of Artificial Sequence: Synthetic oligonucleotide"
  source 1..20: mol_type = other RNA
tttatatttttagtagagac

SEQ ID NO: 2617 - RNA, 20 nt, synthetic construct
  misc_feature 1..20: note = source = /note="Description of Artificial Sequence: Synthetic oligonucleotide"
  source 1..20: mol_type = other RNA
ttatatttttagtagagacg

SEQ ID NO: 2618 - RNA, 20 nt, synthetic construct
  misc_feature 1..20: note = source = /note="Description of Artificial Sequence: Synthetic oligonucleotide"
  source 1..20: mol_type = other RNA
ggggtttcatcatgttgtct

SEQ ID NO: 2619 - RNA, 20 nt, synthetic construct
  misc_feature 1..20: note = source = /note="Description of Artificial Sequence: Synthetic oligonucleotide"
  source 1..20: mol_type = other RNA
tttcatcatgttgtctaggc

SEQ ID NO: 2620 - RNA, 20 nt, synthetic construct
  misc_feature 1..20: note = source = /note="Description of Artificial Sequence: Synthetic oligonucleotide"
  source 1..20: mol_type = other RNA
ctcaagtgatccacccacct

SEQ ID NO: 2621 - RNA, 20 nt, synthetic construct
  misc_feature 1..20: note = source = /note="Description of Artificial Sequence: Synthetic oligonucleotide"
  source 1..20: mol_type = other RNA
accttggcctcccaaagtgc

SEQ ID NO: 2622 - RNA, 20 nt, synthetic construct
  misc_feature 1..20: note = source = /note="Description of Artificial Sequence: Synthetic oligonucleotide"
  source 1..20: mol_type = other RNA
ccttggcctcccaaagtgct

SEQ ID NO: 2623 - RNA, 20 nt, synthetic construct
  misc_feature 1..20: note = source = /note="Description of Artificial Sequence: Synthetic oligonucleotide"
  source 1..20: mol_type = other RNA
tcccaaagtgctgggattgc

SEQ ID NO: 2624 - RNA, 20 nt, synthetic construct
  misc_feature 1..20: note = source = /note="Description of Artificial Sequence: Synthetic oligonucleotide"
  source 1..20: mol_type = other RNA
attgcaggcatgagccaccg

SEQ ID NO: 2625 - RNA, 20 nt, synthetic construct
  misc_feature 1..20: note = source = /note="Description of Artificial Sequence: Synthetic oligonucleotide"
  source 1..20: mol_type = other RNA
aggcatgagccaccgcggcc

SEQ ID NO: 2626 - RNA, 20 nt, synthetic construct
  misc_feature 1..20: note = source = /note="Description of Artificial Sequence: Synthetic oligonucleotide"
  source 1..20: mol_type = other RNA
ttatcagaatattatcatat

SEQ ID NO: 2627 - RNA, 20 nt, synthetic construct
  misc_feature 1..20: note = source = /note="Description of Artificial Sequence: Synthetic oligonucleotide"
  source 1..20: mol_type = other RNA
ctgaacaaagccagaattat

SEQ ID NO: 2628 - RNA, 20 nt, synthetic construct
  misc_feature 1..20: note = source = /note="Description of Artificial Sequence: Synthetic oligonucleotide"
  source 1..20: mol_type = other RNA
gccagaattattggctactg

SEQ ID NO: 2629 - RNA, 20 nt, synthetic construct
  misc_feature 1..20: note = source = /note="Description of Artificial Sequence: Synthetic oligonucleotide"
  source 1..20: mol_type = other RNA
caagagactattctatttgt

SEQ ID NO: 2630 - RNA, 20 nt, synthetic construct
  misc_feature 1..20: note = source = /note="Description of Artificial Sequence: Synthetic oligonucleotide"
  source 1..20: mol_type = other RNA
aagagactattctatttgtt

SEQ ID NO: 2631 - RNA, 20 nt, synthetic construct
  misc_feature 1..20: note = source = /note="Description of Artificial Sequence: Synthetic oligonucleotide"
  source 1..20: mol_type = other RNA
agagactattctatttgttg

SEQ ID NO: 2632 - RNA, 20 nt, synthetic construct
  misc_feature 1..20: note = source = /note="Description of Artificial Sequence: Synthetic oligonucleotide"
  source 1..20: mol_type = other RNA
ggatcacctctttttactaa

SEQ ID NO: 2633 - RNA, 20 nt, synthetic construct
  misc_feature 1..20: note = source = /note="Description of Artificial Sequence: Synthetic oligonucleotide"
  source 1..20: mol_type = other RNA
gatcacctctttttactaaa

SEQ ID NO: 2634 - RNA, 20 nt, synthetic construct
  misc_feature 1..20: note = source = /note="Description of Artificial Sequence: Synthetic oligonucleotide"
  source 1..20: mol_type = other RNA
atcacctctttttactaaag

SEQ ID NO: 2635 - RNA, 20 nt, synthetic construct
  misc_feature 1..20: note = source = /note="Description of Artificial Sequence: Synthetic oligonucleotide"
  source 1..20: mol_type = other RNA
tttactaaaggggactgttt

SEQ ID NO: 2636 - RNA, 20 nt, synthetic construct
  misc_feature 1..20: note = source = /note="Description of Artificial Sequence: Synthetic oligonucleotide"
  source 1..20: mol_type = other RNA
ttactaaaggggactgtttt

SEQ ID NO: 2637 - RNA, 20 nt, synthetic construct
  misc_feature 1..20: note = source = /note="Description of Artificial Sequence: Synthetic oligonucleotide"
  source 1..20: mol_type = other RNA
gcatataaaactagaattca

SEQ ID NO: 2638 - RNA, 20 nt, synthetic construct
  misc_feature 1..20: note = source = /note="Description of Artificial Sequence: Synthetic oligonucleotide"
  source 1..20: mol_type = other RNA
ccagtcaaccagataactgc

SEQ ID NO: 2639 - RNA, 20 nt, synthetic construct
  misc_feature 1..20: note = source = /note="Description of Artificial Sequence: Synthetic oligonucleotide"
  source 1..20: mol_type = other RNA
tagtgacactcatgtcctcc

SEQ ID NO: 2640 - RNA, 20 nt, synthetic construct
  misc_feature 1..20: note = source = /note="Description of Artificial Sequence: Synthetic oligonucleotide"
  source 1..20: mol_type = other RNA
aatcttgtgccagctcagag

SEQ ID NO: 2641 - RNA, 20 nt, synthetic construct
  misc_feature 1..20: note = source = /note="Description of Artificial Sequence: Synthetic oligonucleotide"
  source 1..20: mol_type = other RNA
atcttgtgccagctcagaga

SEQ ID NO: 2642 - RNA, 20 nt, synthetic construct
  misc_feature 1..20: note = source = /note="Description of Artificial Sequence: Synthetic oligonucleotide"
  source 1..20: mol_type = other RNA
aagaaccacaagcaccacct

SEQ ID NO: 2643 - RNA, 20 nt, synthetic construct
  misc_feature 1..20: note = source = /note="Description of Artificial Sequence: Synthetic oligonucleotide"
  source 1..20: mol_type = other RNA
tattttaaacagaaaacaga

SEQ ID NO: 2644 - RNA, 20 nt, synthetic construct
  misc_feature 1..20: note = source = /note="Description of Artificial Sequence: Synthetic oligonucleotide"
  source 1..20: mol_type = other RNA
cctctgccttcctcagtatt

SEQ ID NO: 2645 - RNA, 20 nt, synthetic construct
  misc_feature 1..20: note = source = /note="Description of Artificial Sequence: Synthetic oligonucleotide"
  source 1..20: mol_type = other RNA
ttaagagtctaatcatatac

SEQ ID NO: 2646 - RNA, 20 nt, synthetic construct
  misc_feature 1..20: note = source = /note="Description of Artificial Sequence: Synthetic oligonucleotide"
  source 1..20: mol_type = other RNA
ctgcctgatgaatatttatt

SEQ ID NO: 2647 - RNA, 20 nt, synthetic construct
  misc_feature 1..20: note = source = /note="Description of Artificial Sequence: Synthetic oligonucleotide"
  source 1..20: mol_type = other RNA
ttctaccacttcacactcac

SEQ ID NO: 2648 - RNA, 20 nt, synthetic construct
  misc_feature 1..20: note = source = /note="Description of Artificial Sequence: Synthetic oligonucleotide"
  source 1..20: mol_type = other RNA
tctaccacttcacactcact

SEQ ID NO: 2649 - RNA, 20 nt, synthetic construct
  misc_feature 1..20: note = source = /note="Description of Artificial Sequence: Synthetic oligonucleotide"
  source 1..20: mol_type = other RNA
ccacttcacactcactggga

SEQ ID NO: 2650 - RNA, 20 nt, synthetic construct
  misc_feature 1..20: note = source = /note="Description of Artificial Sequence: Synthetic oligonucleotide"
  source 1..20: mol_type = other RNA
tttttaaaacatacaataac

SEQ ID NO: 2651 - RNA, 20 nt, synthetic construct
  misc_feature 1..20: note = source = /note="Description of Artificial Sequence: Synthetic oligonucleotide"
  source 1..20: mol_type = other RNA
tacaataacaggtgttagtg

SEQ ID NO: 2652 - RNA, 20 nt, synthetic construct
  misc_feature 1..20: note = source = /note="Description of Artificial Sequence: Synthetic oligonucleotide"
  source 1..20: mol_type = other RNA
aacaggtgttagtgcggata

SEQ ID NO: 2653 - RNA, 20 nt, synthetic construct
  misc_feature 1..20: note = source = /note="Description of Artificial Sequence: Synthetic oligonucleotide"
  source 1..20: mol_type = other RNA
tagtgcggatatggaaaaat

SEQ ID NO: 2654 - RNA, 20 nt, synthetic construct
  misc_feature 1..20: note = source = /note="Description of Artificial Sequence: Synthetic oligonucleotide"
  source 1..20: mol_type = other RNA
gaaccctgacacattgctag

SEQ ID NO: 2655 - RNA, 20 nt, synthetic construct
  misc_feature 1..20: note = source = /note="Description of Artificial Sequence: Synthetic oligonucleotide"
  source 1..20: mol_type = other RNA
attgctagtggaatgtaaaa

SEQ ID NO: 2656 - RNA, 20 nt, synthetic construct
  misc_feature 1..20: note = source = /note="Description of Artificial Sequence: Synthetic oligonucleotide"
  source 1..20: mol_type = other RNA
agccactttgcaaaacagtt

SEQ ID NO: 2657 - RNA, 20 nt, synthetic construct
  misc_feature 1..20: note = source = /note="Description of Artificial Sequence: Synthetic oligonucleotide"
  source 1..20: mol_type = other RNA
gttcatcaaaagattaagca

SEQ ID NO: 2658 - RNA, 20 nt, synthetic construct
  misc_feature 1..20: note = source = /note="Description of Artificial Sequence: Synthetic oligonucleotide"
  source 1..20: mol_type = other RNA
gacccagtagtttcgctctt

SEQ ID NO: 2659 - RNA, 20 nt, synthetic construct
  misc_feature 1..20: note = source = /note="Description of Artificial Sequence: Synthetic oligonucleotide"
  source 1..20: mol_type = other RNA
acccagtagtttcgctctta

SEQ ID NO: 2660 - RNA, 20 nt, synthetic construct
  misc_feature 1..20: note = source = /note="Description of Artificial Sequence: Synthetic oligonucleotide"
  source 1..20: mol_type = other RNA
cattattcacaatagcctaa

SEQ ID NO: 2661 - RNA, 20 nt, synthetic construct
  misc_feature 1..20: note = source = /note="Description of Artificial Sequence: Synthetic oligonucleotide"
  source 1..20: mol_type = other RNA
gcaacccaaatgcctacaga

SEQ ID NO: 2662 - RNA, 20 nt, synthetic construct
  misc_feature 1..20: note = source = /note="Description of Artificial Sequence: Synthetic oligonucleotide"
  source 1..20: mol_type = other RNA
aatgcctacagatggatgaa

SEQ ID NO: 2663 - RNA, 20 nt, synthetic construct
  misc_feature 1..20: note = source = /note="Description of Artificial Sequence: Synthetic oligonucleotide"
  source 1..20: mol_type = other RNA
atgaatggataaacagaatg

SEQ ID NO: 2664 - RNA, 20 nt, synthetic construct
  misc_feature 1..20: note = source = /note="Description of Artificial Sequence: Synthetic oligonucleotide"
  source 1..20: mol_type = other RNA
aatgtggtatagacatacaa

SEQ ID NO: 2665 - RNA, 20 nt, synthetic construct
  misc_feature 1..20: note = source = /note="Description of Artificial Sequence: Synthetic oligonucleotide"
  source 1..20: mol_type = other RNA
actattattcaaccttaaag

SEQ ID NO: 2666 - RNA, 20 nt, synthetic construct
  misc_feature 1..20: note = source = /note="Description of Artificial Sequence: Synthetic oligonucleotide"
  source 1..20: mol_type = other RNA
gacacatgctagaaaataaa

SEQ ID NO: 2667 - RNA, 20 nt, synthetic construct
  misc_feature 1..20: note = source = /note="Description of Artificial Sequence: Synthetic oligonucleotide"
  source 1..20: mol_type = other RNA
cttgtatacattctactaag

SEQ ID NO: 2668 - RNA, 20 nt, synthetic construct
  misc_feature 1..20: note = source = /note="Description of Artificial Sequence: Synthetic oligonucleotide"
  source 1..20: mol_type = other RNA
attatgattccacttacatg

SEQ ID NO: 2669 - RNA, 20 nt, synthetic construct
  misc_feature 1..20: note = source = /note="Description of Artificial Sequence: Synthetic oligonucleotide"
  source 1..20: mol_type = other RNA
tagaatagtcaaattaatag

SEQ ID NO: 2670 - RNA, 20 nt, synthetic construct
  misc_feature 1..20: note = source = /note="Description of Artificial Sequence: Synthetic oligonucleotide"
  source 1..20: mol_type = other RNA
acagtagaataatgattgcc

SEQ ID NO: 2671 - RNA, 20 nt, synthetic construct
  misc_feature 1..20: note = source = /note="Description of Artificial Sequence: Synthetic oligonucleotide"
  source 1..20: mol_type = other RNA
cagtagaataatgattgcca

SEQ ID NO: 2672 - RNA, 20 nt, synthetic construct
  misc_feature 1..20: note = source = /note="Description of Artificial Sequence: Synthetic oligonucleotide"
  source 1..20: mol_type = other RNA
agtagaataatgattgccag

SEQ ID NO: 2673 - RNA, 20 nt, synthetic construct
  misc_feature 1..20: note = source = /note="Description of Artificial Sequence: Synthetic oligonucleotide"
  source 1..20: mol_type = other RNA
gaataatgattgccaggggc

SEQ ID NO: 2674 - RNA, 20 nt, synthetic construct
  misc_feature 1..20: note = source = /note="Description of Artificial Sequence: Synthetic oligonucleotide"
  source 1..20: mol_type = other RNA
aataatgattgccaggggct

SEQ ID NO: 2675 - RNA, 20 nt, synthetic construct
  misc_feature 1..20: note = source = /note="Description of Artificial Sequence: Synthetic oligonucleotide"
  source 1..20: mol_type = other RNA
aatgattgccaggggctggg

SEQ ID NO: 2676 - RNA, 20 nt, synthetic construct
  misc_feature 1..20: note = source = /note="Description of Artificial Sequence: Synthetic oligonucleotide"
  source 1..20: mol_type = other RNA
gattgccaggggctgggagg

SEQ ID NO: 2677 - RNA, 20 nt, synthetic construct
  misc_feature 1..20: note = source = /note="Description of Artificial Sequence: Synthetic oligonucleotide"
  source 1..20: mol_type = other RNA
gggctgggaggaggagcaaa

SEQ ID NO: 2678 - RNA, 20 nt, synthetic construct
  misc_feature 1..20: note = source = /note="Description of Artificial Sequence: Synthetic oligonucleotide"
  source 1..20: mol_type = other RNA
ggctgggaggaggagcaaat

SEQ ID NO: 2679 - RNA, 20 nt, synthetic construct
  misc_feature 1..20: note = source = /note="Description of Artificial Sequence: Synthetic oligonucleotide"
  source 1..20: mol_type = other RNA
tgagtatagaatttctgttt

SEQ ID NO: 2680 - RNA, 20 nt, synthetic construct
  misc_feature 1..20: note = source = /note="Description of Artificial Sequence: Synthetic oligonucleotide"
  source 1..20: mol_type = other RNA
ttaggaagatgaaaaagttc

SEQ ID NO: 2681 - RNA, 20 nt, synthetic construct
  misc_feature 1..20: note = source = /note="Description of Artificial Sequence: Synthetic oligonucleotide"
  source 1..20: mol_type = other RNA
agatgaaaaagttctggaga

SEQ ID NO: 2682 - RNA, 20 nt, synthetic construct
  misc_feature 1..20: note = source = /note="Description of Artificial Sequence: Synthetic oligonucleotide"
  source 1..20: mol_type = other RNA
gatgaaaaagttctggagat

SEQ ID NO: 2683 - RNA, 20 nt, synthetic construct
  misc_feature 1..20: note = source = /note="Description of Artificial Sequence: Synthetic oligonucleotide"
  source 1..20: mol_type = other RNA
gaaaaagttctggagatggg

SEQ ID NO: 2684 - RNA, 20 nt, synthetic construct
  misc_feature 1..20: note = source = /note="Description of Artificial Sequence: Synthetic oligonucleotide"
  source 1..20: mol_type = other RNA
ctggagatgggtggcagtga

SEQ ID NO: 2685 - RNA, 20 nt, synthetic construct
  misc_feature 1..20: note = source = /note="Description of Artificial Sequence: Synthetic oligonucleotide"
  source 1..20: mol_type = other RNA
cagaatagtatacttaaata

SEQ ID NO: 2686 - RNA, 20 nt, synthetic construct
  misc_feature 1..20: note = source = /note="Description of Artificial Sequence: Synthetic oligonucleotide"
  source 1..20: mol_type = other RNA
atacttaaatatggtttgaa

SEQ ID NO: 2687 - RNA, 20 nt, synthetic construct
  misc_feature 1..20: note = source = /note="Description of Artificial Sequence: Synthetic oligonucleotide"
  source 1..20: mol_type = other RNA
ccaaagaagcattatttatg

SEQ ID NO: 2688 - RNA, 20 nt, synthetic construct
  misc_feature 1..20: note = source = /note="Description of Artificial Sequence: Synthetic oligonucleotide"
  source 1..20: mol_type = other RNA
attatttatgaggctaaaag

SEQ ID NO: 2689 - RNA, 20 nt, synthetic construct
  misc_feature 1..20: note = source = /note="Description of Artificial Sequence: Synthetic oligonucleotide"
  source 1..20: mol_type = other RNA
agttcatcattgatagctaa

SEQ ID NO: 2690 - RNA, 20 nt, synthetic construct
  misc_feature 1..20: note = source = /note="Description of Artificial Sequence: Synthetic oligonucleotide"
  source 1..20: mol_type = other RNA
attgatagctaaaggaaaca

SEQ ID NO: 2691 - RNA, 20 nt, synthetic construct
  misc_feature 1..20: note = source = /note="Description of Artificial Sequence: Synthetic oligonucleotide"
  source 1..20: mol_type = other RNA
gtagaatattagtcatacaa

SEQ ID NO: 2692 - RNA, 20 nt, synthetic construct
  misc_feature 1..20: note = source = /note="Description of Artificial Sequence: Synthetic oligonucleotide"
  source 1..20: mol_type = other RNA
tgaaagaaaccagacgtaaa

SEQ ID NO: 2693 - RNA, 20 nt, synthetic construct
  misc_feature 1..20: note = source = /note="Description of Artificial Sequence: Synthetic oligonucleotide"
  source 1..20: mol_type = other RNA
gtaaaaggccaaattttgta

SEQ ID NO: 2694 - RNA, 20 nt, synthetic construct
  misc_feature 1..20: note = source = /note="Description of Artificial Sequence: Synthetic oligonucleotide"
  source 1..20: mol_type = other RNA
tatataaagtcgttcaaaat

SEQ ID NO: 2695 - RNA, 20 nt, synthetic construct
  misc_feature 1..20: note = source = /note="Description of Artificial Sequence: Synthetic oligonucleotide"
  source 1..20: mol_type = other RNA
aaagactgaaagttgattag

SEQ ID NO: 2696 - RNA, 20 nt, synthetic construct
  misc_feature 1..20: note = source = /note="Description of Artificial Sequence: Synthetic oligonucleotide"
  source 1..20: mol_type = other RNA
aagttgattagtggtcacca

SEQ ID NO: 2697 - RNA, 20 nt, synthetic construct
  misc_feature 1..20: note = source = /note="Description of Artificial Sequence: Synthetic oligonucleotide"
  source 1..20: mol_type = other RNA
gattagtggtcaccaaggcc

SEQ ID NO: 2698 - RNA, 20 nt, synthetic construct
  misc_feature 1..20: note = source = /note="Description of Artificial Sequence: Synthetic oligonucleotide"
  source 1..20: mol_type = other RNA
attagtggtcaccaaggccc

SEQ ID NO: 2699 - RNA, 20 nt, synthetic construct
  misc_feature 1..20: note = source = /note="Description of Artificial Sequence: Synthetic oligonucleotide"
  source 1..20: mol_type = other RNA
ttagtggtcaccaaggcccg

SEQ ID NO: 2700 - RNA, 20 nt, synthetic construct
  misc_feature 1..20: note = source = /note="Description of Artificial Sequence: Synthetic oligonucleotide"
  source 1..20: mol_type = other RNA
tagtggtcaccaaggcccgg

SEQ ID NO: 2701 - RNA, 20 nt, synthetic construct
  misc_feature 1..20: note = source = /note="Description of Artificial Sequence: Synthetic oligonucleotide"
  source 1..20: mol_type = other RNA
tggtcaccaaggcccggggg

SEQ ID NO: 2702 - RNA, 20 nt, synthetic construct
  misc_feature 1..20: note = source = /note="Description of Artificial Sequence: Synthetic oligonucleotide"
  source 1..20: mol_type = other RNA
ggggaggaatgaatgaaaac

SEQ ID NO: 2703 - RNA, 20 nt, synthetic construct
  misc_feature 1..20: note = source = /note="Description of Artificial Sequence: Synthetic oligonucleotide"
  source 1..20: mol_type = other RNA
gaatgaaaactggctcctaa

SEQ ID NO: 2704 - RNA, 20 nt, synthetic construct
  misc_feature 1..20: note = source = /note="Description of Artificial Sequence: Synthetic oligonucleotide"
  source 1..20: mol_type = other RNA
aatgaaaactggctcctaat

SEQ ID NO: 2705 - RNA, 20 nt, synthetic construct
  misc_feature 1..20: note = source = /note="Description of Artificial Sequence: Synthetic oligonucleotide"
  source 1..20: mol_type = other RNA
aactggctcctaatgggtac

SEQ ID NO: 2706 - RNA, 20 nt, synthetic construct
  misc_feature 1..20: note = source = /note="Description of Artificial Sequence: Synthetic oligonucleotide"
  source 1..20: mol_type = other RNA
actggctcctaatgggtact

SEQ ID NO: 2707 - RNA, 20 nt, synthetic construct
  misc_feature 1..20: note = source = /note="Description of Artificial Sequence: Synthetic oligonucleotide"
  source 1..20: mol_type = other RNA
ctaatgggtactgggttttt

SEQ ID NO: 2708 - RNA, 20 nt, synthetic construct
  misc_feature 1..20: note = source = /note="Description of Artificial Sequence: Synthetic oligonucleotide"
  source 1..20: mol_type = other RNA
taatgggtactgggtttttt

SEQ ID NO: 2709 - RNA, 20 nt, synthetic construct
  misc_feature 1..20: note = source = /note="Description of Artificial Sequence: Synthetic oligonucleotide"
  source 1..20: mol_type = other RNA
aatgggtactgggttttttg

SEQ ID NO: 2710 - RNA, 20 nt, synthetic construct
  misc_feature 1..20: note = source = /note="Description of Artificial Sequence: Synthetic oligonucleotide"
  source 1..20: mol_type = other RNA
gtactgggttttttggggcg

SEQ ID NO: 2711 - RNA, 20 nt, synthetic construct
  misc_feature 1..20: note = source = /note="Description of Artificial Sequence: Synthetic oligonucleotide"
  source 1..20: mol_type = other RNA
tactgggttttttggggcga

SEQ ID NO: 2712 - RNA, 20 nt, synthetic construct
  misc_feature 1..20: note = source = /note="Description of Artificial Sequence: Synthetic oligonucleotide"
  source 1..20: mol_type = other RNA
actgggttttttggggcgag

SEQ ID NO: 2713 - RNA, 20 nt, synthetic construct
  misc_feature 1..20: note = source = /note="Description of Artificial Sequence: Synthetic oligonucleotide"
  source 1..20: mol_type = other RNA
ctgggttttttggggcgagg

SEQ ID NO: 2714 - RNA, 20 nt, synthetic construct
  misc_feature 1..20: note = source = /note="Description of Artificial Sequence: Synthetic oligonucleotide"
  source 1..20: mol_type = other RNA
tagaatttgatagtaatgat

SEQ ID NO: 2715 - RNA, 20 nt, synthetic construct
  misc_feature 1..20: note = source = /note="Description of Artificial Sequence: Synthetic oligonucleotide"
  source 1..20: mol_type = other RNA
atagtaatgataggtgagag

SEQ ID NO: 2716 - RNA, 20 nt, synthetic construct
  misc_feature 1..20: note = source = /note="Description of Artificial Sequence: Synthetic oligonucleotide"
  source 1..20: mol_type = other RNA
actgactcatatactttaca

SEQ ID NO: 2717 - RNA, 20 nt, synthetic construct
  misc_feature 1..20: note = source = /note="Description of Artificial Sequence: Synthetic oligonucleotide"
  source 1..20: mol_type = other RNA
ctttacaaggatgtatttta

SEQ ID NO: 2718 - RNA, 20 nt, synthetic construct
  misc_feature 1..20: note = source = /note="Description of Artificial Sequence: Synthetic oligonucleotide"
  source 1..20: mol_type = other RNA
accccttaaattttaacgta

SEQ ID NO: 2719 - RNA, 20 nt, synthetic construct
  misc_feature 1..20: note = source = /note="Description of Artificial Sequence: Synthetic oligonucleotide"
  source 1..20: mol_type = other RNA
agtctcagcttactatttct

SEQ ID NO: 2720 - RNA, 20 nt, synthetic construct
  misc_feature 1..20: note = source = /note="Description of Artificial Sequence: Synthetic oligonucleotide"
  source 1..20: mol_type = other RNA
tcccttcttactctgtaaaa

SEQ ID NO: 2721 - RNA, 20 nt, synthetic construct
  misc_feature 1..20: note = source = /note="Description of Artificial Sequence: Synthetic oligonucleotide"
  source 1..20: mol_type = other RNA
cccttcttactctgtaaaat

SEQ ID NO: 2722 - RNA, 20 nt, synthetic construct
  misc_feature 1..20: note = source = /note="Description of Artificial Sequence: Synthetic oligonucleotide"
  source 1..20: mol_type = other RNA
atttttttgagtgttaaatg

SEQ ID NO: 2723 - RNA, 20 nt, synthetic construct
  misc_feature 1..20: note = source = /note="Description of Artificial Sequence: Synthetic oligonucleotide"
  source 1..20: mol_type = other RNA
agtgcatctagcatagtgtc

SEQ ID NO: 2724 - RNA, 20 nt, synthetic construct
  misc_feature 1..20: note = source = /note="Description of Artificial Sequence: Synthetic oligonucleotide"
  source 1..20: mol_type = other RNA
ctggcatttaccaagaaccc

SEQ ID NO: 2725 - RNA, 20 nt, synthetic construct
  misc_feature 1..20: note = source = /note="Description of Artificial Sequence: Synthetic oligonucleotide"
  source 1..20: mol_type = other RNA
tggcatttaccaagaacccc

SEQ ID NO: 2726 - RNA, 20 nt, synthetic construct
  misc_feature 1..20: note = source = /note="Description of Artificial Sequence: Synthetic oligonucleotide"
  source 1..20: mol_type = other RNA
actattccagatactatttc

SEQ ID NO: 2727 - RNA, 20 nt, synthetic construct
  misc_feature 1..20: note = source = /note="Description of Artificial Sequence: Synthetic oligonucleotide"
  source 1..20: mol_type = other RNA
aatactgtttccatatattc

SEQ ID NO: 2728 - RNA, 20 nt, synthetic construct
  misc_feature 1..20: note = source = /note="Description of Artificial Sequence: Synthetic oligonucleotide"
  source 1..20: mol_type = other RNA
tttccatatattcaggacaa

SEQ ID NO: 2729 - RNA, 20 nt, synthetic construct
  misc_feature 1..20: note = source = /note="Description of Artificial Sequence: Synthetic oligonucleotide"
  source 1..20: mol_type = other RNA
ctttagattctgtttcaaat

SEQ ID NO: 2730 - RNA, 20 nt, synthetic construct
  misc_feature 1..20: note = source = /note="Description of Artificial Sequence: Synthetic oligonucleotide"
  source 1..20: mol_type = other RNA
tcctcttttctctctgccct

SEQ ID NO: 2731 - RNA, 20 nt, synthetic construct
  misc_feature 1..20: note = source = /note="Description of Artificial Sequence: Synthetic oligonucleotide"
  source 1..20: mol_type = other RNA
tctctgcccttggaactctg

SEQ ID NO: 2732 - RNA, 20 nt, synthetic construct
  misc_feature 1..20: note = source = /note="Description of Artificial Sequence: Synthetic oligonucleotide"
  source 1..20: mol_type = other RNA
ttgaccaattaagtcttact

SEQ ID NO: 2733 - RNA, 20 nt, synthetic construct
  misc_feature 1..20: note = source = /note="Description of Artificial Sequence: Synthetic oligonucleotide"
  source 1..20: mol_type = other RNA
tgaccaattaagtcttactt

SEQ ID NO: 2734 - RNA, 20 nt, synthetic construct
  misc_feature 1..20: note = source = /note="Description of Artificial Sequence: Synthetic oligonucleotide"
  source 1..20: mol_type = other RNA
ttgggttatgtttttaaagt

SEQ ID NO: 2735 - RNA, 20 nt, synthetic construct
  misc_feature 1..20: note = source = /note="Description of Artificial Sequence: Synthetic oligonucleotide"
  source 1..20: mol_type = other RNA
tttaaagtaggtatcttatt

SEQ ID NO: 2736 - RNA, 20 nt, synthetic construct
  misc_feature 1..20: note = source = /note="Description of Artificial Sequence: Synthetic oligonucleotide"
  source 1..20: mol_type = other RNA
aaagtaggtatcttattagg

SEQ ID NO: 2737 - RNA, 20 nt, synthetic construct
  misc_feature 1..20: note = source = /note="Description of Artificial Sequence: Synthetic oligonucleotide"
  source 1..20: mol_type = other RNA
cttagcatgttaccttgaca

SEQ ID NO: 2738 - RNA, 20 nt, synthetic construct
  misc_feature 1..20: note = source = /note="Description of Artificial Sequence: Synthetic oligonucleotide"
  source 1..20: mol_type = other RNA
tgccacatctcatgaagtac

SEQ ID NO: 2739 - RNA, 20 nt, synthetic construct
  misc_feature 1..20: note = source = /note="Description of Artificial Sequence: Synthetic oligonucleotide"
  source 1..20: mol_type = other RNA
gccacatctcatgaagtaca

SEQ ID NO: 2740 - RNA, 20 nt, synthetic construct
  misc_feature 1..20: note = source = /note="Description of Artificial Sequence: Synthetic oligonucleotide"
  source 1..20: mol_type = other RNA
gacttcatcttacagtcacc

SEQ ID NO: 2741 - RNA, 20 nt, synthetic construct
  misc_feature 1..20: note = source = /note="Description of Artificial Sequence: Synthetic oligonucleotide"
  source 1..20: mol_type = other RNA
aaatcctcaacttcttacct

SEQ ID NO: 2742 - RNA, 20 nt, synthetic construct
  misc_feature 1..20: note = source = /note="Description of Artificial Sequence: Synthetic oligonucleotide"
  source 1..20: mol_type = other RNA
taagccacactgtgaaccac

SEQ ID NO: 2743 - RNA, 20 nt, synthetic construct
  misc_feature 1..20: note = source = /note="Description of Artificial Sequence: Synthetic oligonucleotide"
  source 1..20: mol_type = other RNA
gatgaagtaatataagccac

SEQ ID NO: 2744 - RNA, 20 nt, synthetic construct
  misc_feature 1..20: note = source = /note="Description of Artificial Sequence: Synthetic oligonucleotide"
  source 1..20: mol_type = other RNA
ttaagcctcattgattattg

SEQ ID NO: 2745 - RNA, 20 nt, synthetic construct
  misc_feature 1..20: note = source = /note="Description of Artificial Sequence: Synthetic oligonucleotide"
  source 1..20: mol_type = other RNA
tgtgaagactaaagatgctt

SEQ ID NO: 2746 - RNA, 20 nt, synthetic construct
  misc_feature 1..20: note = source = /note="Description of Artificial Sequence: Synthetic oligonucleotide"
  source 1..20: mol_type = other RNA
gtgaagactaaagatgcttt

SEQ ID NO: 2747 - RNA, 20 nt, synthetic construct
  misc_feature 1..20: note = source = /note="Description of Artificial Sequence: Synthetic oligonucleotide"
  source 1..20: mol_type = other RNA
gactaaagatgctttgggca

SEQ ID NO: 2748 - RNA, 20 nt, synthetic construct
  misc_feature 1..20: note = source = /note="Description of Artificial Sequence: Synthetic oligonucleotide"
  source 1..20: mol_type = other RNA
agatattagaattgttatta

SEQ ID NO: 2749 - RNA, 20 nt, synthetic construct
  misc_feature 1..20: note = source = /note="Description of Artificial Sequence: Synthetic oligonucleotide"
  source 1..20: mol_type = other RNA
ttttaacagccacactgtaa

SEQ ID NO: 2750 - RNA, 20 nt, synthetic construct
  misc_feature 1..20: note = source = /note="Description of Artificial Sequence: Synthetic oligonucleotide"
  source 1..20: mol_type = other RNA
taatggaaatatccaattat

SEQ ID NO: 2751 - RNA, 20 nt, synthetic construct
  misc_feature 1..20: note = source = /note="Description of Artificial Sequence: Synthetic oligonucleotide"
  source 1..20: mol_type = other RNA
ccttttaaactctttatatc

SEQ ID NO: 2752 - RNA, 20 nt, synthetic construct
  misc_feature 1..20: note = source = /note="Description of Artificial Sequence: Synthetic oligonucleotide"
  source 1..20: mol_type = other RNA
agaagaaagggagagtttcg

SEQ ID NO: 2753 - RNA, 20 nt, synthetic construct
  misc_feature 1..20: note = source = /note="Description of Artificial Sequence: Synthetic oligonucleotide"
  source 1..20: mol_type = other RNA
aaagcgaaggggagaagaaa

SEQ ID NO: 2754 - RNA, 20 nt, synthetic construct
  misc_feature 1..20: note = source = /note="Description of Artificial Sequence: Synthetic oligonucleotide"
  source 1..20: mol_type = other RNA
aaaagcgaaggggagaagaa

SEQ ID NO: 2755 - RNA, 20 nt, synthetic construct
  misc_feature 1..20: note = source = /note="Description of Artificial Sequence: Synthetic oligonucleotide"
  source 1..20: mol_type = other RNA
aagcccgagaaaaagcgaag

SEQ ID NO: 2756 - RNA, 20 nt, synthetic construct
  misc_feature 1..20: note = source = /note="Description of Artificial Sequence: Synthetic oligonucleotide"
  source 1..20: mol_type = other RNA
gaagcccgagaaaaagcgaa

SEQ ID NO: 2757 - RNA, 20 nt, synthetic construct
  misc_feature 1..20: note = source = /note="Description of Artificial Sequence: Synthetic oligonucleotide"
  source 1..20: mol_type = other RNA
ggaagcccgagaaaaagcga

SEQ ID NO: 2758 - RNA, 20 nt, synthetic construct
  misc_feature 1..20: note = source = /note="Description of Artificial Sequence: Synthetic oligonucleotide"
  source 1..20: mol_type = other RNA
agggtttgctccccagtccc

SEQ ID NO: 2759 - RNA, 20 nt, synthetic construct
  misc_feature 1..20: note = source = /note="Description of Artificial Sequence: Synthetic oligonucleotide"
  source 1..20: mol_type = other RNA
tatttgtgggtgacactaca

SEQ ID NO: 2760 - RNA, 20 nt, synthetic construct
  misc_feature 1..20: note = source = /note="Description of Artificial Sequence: Synthetic oligonucleotide"
  source 1..20: mol_type = other RNA
gtatttgtgggtgacactac

SEQ ID NO: 2761 - RNA, 20 nt, synthetic construct
  misc_feature 1..20: note = source = /note="Description of Artificial Sequence: Synthetic oligonucleotide"
  source 1..20: mol_type = other RNA
tcttccctcttggtatttgt

SEQ ID NO: 2762 - RNA, 20 nt, synthetic construct
  misc_feature 1..20: note = source = /note="Description of Artificial Sequence: Synthetic oligonucleotide"
  source 1..20: mol_type = other RNA
ctcttccctcttggtatttg

SEQ ID NO: 2763 - RNA, 20 nt, synthetic construct
  misc_feature 1..20: note = source = /note="Description of Artificial Sequence: Synthetic oligonucleotide"
  source 1..20: mol_type = other RNA
gaagcttccctcttccctct

SEQ ID NO: 2764 - RNA, 20 nt, synthetic construct
  misc_feature 1..20: note = source = /note="Description of Artificial Sequence: Synthetic oligonucleotide"
  source 1..20: mol_type = other RNA
atttgtcagccatgttgaag

SEQ ID NO: 2765 - RNA, 20 nt, synthetic construct
  misc_feature 1..20: note = source = /note="Description of Artificial Sequence: Synthetic oligonucleotide"
  source 1..20: mol_type = other RNA
acaggtttaaaaggggtaga

SEQ ID NO: 2766 - RNA, 20 nt, synthetic construct
  misc_feature 1..20: note = source = /note="Description of Artificial Sequence: Synthetic oligonucleotide"
  source 1..20: mol_type = other RNA
tacaggtttaaaaggggtag

SEQ ID NO: 2767 - RNA, 20 nt, synthetic construct
  misc_feature 1..20: note = source = /note="Description of Artificial Sequence: Synthetic oligonucleotide"
  source 1..20: mol_type = other RNA
cagaactacaggtttaaaag

SEQ ID NO: 2768 - RNA, 20 nt, synthetic construct
  misc_feature 1..20: note = source = /note="Description of Artificial Sequence: Synthetic oligonucleotide"
  source 1..20: mol_type = other RNA
acagaactacaggtttaaaa

SEQ ID NO: 2769 - RNA, 20 nt, synthetic construct
  misc_feature 1..20: note = source = /note="Description of Artificial Sequence: Synthetic oligonucleotide"
  source 1..20: mol_type = other RNA
cacagaactacaggtttaaa

SEQ ID NO: 2770 - RNA, 20 nt, synthetic construct
  misc_feature 1..20: note = source = /note="Description of Artificial Sequence: Synthetic oligonucleotide"
  source 1..20: mol_type = other RNA
agaagagaacacagaactac

SEQ ID NO: 2771 - RNA, 20 nt, synthetic construct
  misc_feature 1..20: note = source = /note="Description of Artificial Sequence: Synthetic oligonucleotide"
  source 1..20: mol_type = other RNA
atgaggggacgagcattagg

SEQ ID NO: 2772 - RNA, 20 nt, synthetic construct
  misc_feature 1..20: note = source = /note="Description of Artificial Sequence: Synthetic oligonucleotide"
  source 1..20: mol_type = other RNA
gagatgaggggacgagcatt

SEQ ID NO: 2773 - RNA, 20 nt, synthetic construct
  misc_feature 1..20: note = source = /note="Description of Artificial Sequence: Synthetic oligonucleotide"
  source 1..20: mol_type = other RNA
taagttttctgggagatgag

SEQ ID NO: 2774 - RNA, 20 nt, synthetic construct
  misc_feature 1..20: note = source = /note="Description of Artificial Sequence: Synthetic oligonucleotide"
  source 1..20: mol_type = other RNA
gtaagttttctgggagatga

SEQ ID NO: 2775 - RNA, 20 nt, synthetic construct
  misc_feature 1..20: note = source = /note="Description of Artificial Sequence: Synthetic oligonucleotide"
  source 1..20: mol_type = other RNA
ggtaagttttctgggagatg

SEQ ID NO: 2776 - RNA, 20 nt, synthetic construct
  misc_feature 1..20: note = source = /note="Description of Artificial Sequence: Synthetic oligonucleotide"
  source 1..20: mol_type = other RNA
ggcacaaaggtaagttttct

SEQ ID NO: 2777 - RNA, 20 nt, synthetic construct
  misc_feature 1..20: note = source = /note="Description of Artificial Sequence: Synthetic oligonucleotide"
  source 1..20: mol_type = other RNA
aggcacaaaggtaagttttc

SEQ ID NO: 2778 - RNA, 20 nt, synthetic construct
  misc_feature 1..20: note = source = /note="Description of Artificial Sequence: Synthetic oligonucleotide"
  source 1..20: mol_type = other RNA
ccggctcgtcggaggcacaa

SEQ ID NO: 2779 - RNA, 20 nt, synthetic construct
  misc_feature 1..20: note = source = /note="Description of Artificial Sequence: Synthetic oligonucleotide"
  source 1..20: mol_type = other RNA
ccgggaaaccggctcgtcgg

SEQ ID NO: 2780 - RNA, 20 nt, synthetic construct
  misc_feature 1..20: note = source = /note="Description of Artificial Sequence: Synthetic oligonucleotide"
  source 1..20: mol_type = other RNA
aggccgggaaaccggctcgt

SEQ ID NO: 2781 - RNA, 20 nt, synthetic construct
  misc_feature 1..20: note = source = /note="Description of Artificial Sequence: Synthetic oligonucleotide"
  source 1..20: mol_type = other RNA
attaaaaaaggccgggaaac

SEQ ID NO: 2782 - RNA, 20 nt, synthetic construct
  misc_feature 1..20: note = source = /note="Description of Artificial Sequence: Synthetic oligonucleotide"
  source 1..20: mol_type = other RNA
tctgaggattaaaaaaggcc

SEQ ID NO: 2783 - RNA, 20 nt, synthetic construct
  misc_feature 1..20: note = source = /note="Description of Artificial Sequence: Synthetic oligonucleotide"
  source 1..20: mol_type = other RNA
ttctgaggattaaaaaaggc

SEQ ID NO: 2784 - RNA, 20 nt, synthetic construct
  misc_feature 1..20: note = source = /note="Description of Artificial Sequence: Synthetic oligonucleotide"
  source 1..20: mol_type = other RNA
acttttctgaggattaaaaa

SEQ ID NO: 2785 - RNA, 20 nt, synthetic construct
  misc_feature 1..20: note = source = /note="Description of Artificial Sequence: Synthetic oligonucleotide"
  source 1..20: mol_type = other RNA
atttaaaaatcacttttctg

SEQ ID NO: 2786 - RNA, 20 nt, synthetic construct
  misc_feature 1..20: note = source = /note="Description of Artificial Sequence: Synthetic oligonucleotide"
  source 1..20: mol_type = other RNA
aaagctgaactattttagaa

SEQ ID NO: 2787 - RNA, 20 nt, synthetic construct
  misc_feature 1..20: note = source = /note="Description of Artificial Sequence: Synthetic oligonucleotide"
  source 1..20: mol_type = other RNA
aacaggggaagaggattaaa

SEQ ID NO: 2788 - RNA, 20 nt, synthetic construct
  misc_feature 1..20: note = source = /note="Description of Artificial Sequence: Synthetic oligonucleotide"
  source 1..20: mol_type = other RNA
aaacaggggaagaggattaa

SEQ ID NO: 2789 - RNA, 20 nt, synthetic construct
  misc_feature 1..20: note = source = /note="Description of Artificial Sequence: Synthetic oligonucleotide"
  source 1..20: mol_type = other RNA
cacgaaagaaacaggggaag

SEQ ID NO: 2790 - RNA, 20 nt, synthetic construct
  misc_feature 1..20: note = source = /note="Description of Artificial Sequence: Synthetic oligonucleotide"
  source 1..20: mol_type = other RNA
cacttacacgaaagaaacag

SEQ ID NO: 2791 - RNA, 20 nt, synthetic construct
  misc_feature 1..20: note = source = /note="Description of Artificial Sequence: Synthetic oligonucleotide"
  source 1..20: mol_type = other RNA
tcacttacacgaaagaaaca

SEQ ID NO: 2792 - RNA, 20 nt, synthetic construct
  misc_feature 1..20: note = source = /note="Description of Artificial Sequence: Synthetic oligonucleotide"
  source 1..20: mol_type = other RNA
ttcacttacacgaaagaaac

SEQ ID NO: 2793 - RNA, 20 nt, synthetic construct
  misc_feature 1..20: note = source = /note="Description of Artificial Sequence: Synthetic oligonucleotide"
  source 1..20: mol_type = other RNA
tgaggttgttcaggataaac

SEQ ID NO: 2794 - RNA, 20 nt, synthetic construct
  misc_feature 1..20: note = source = /note="Description of Artificial Sequence: Synthetic oligonucleotide"
  source 1..20: mol_type = other RNA
ctgaggttgttcaggataaa

SEQ ID NO: 2795 - RNA, 20 nt, synthetic construct
  misc_feature 1..20: note = source = /note="Description of Artificial Sequence: Synthetic oligonucleotide"
  source 1..20: mol_type = other RNA
tgttctctctgaggttgttc

SEQ ID NO: 2796 - RNA, 20 nt, synthetic construct
  misc_feature 1..20: note = source = /note="Description of Artificial Sequence: Synthetic oligonucleotide"
  source 1..20: mol_type = other RNA
ccctatcagtgttctctctg

SEQ ID NO: 2797 - RNA, 20 nt, synthetic construct
  misc_feature 1..20: note = source = /note="Description of Artificial Sequence: Synthetic oligonucleotide"
  source 1..20: mol_type = other RNA
agaccctacagctgataaaa

SEQ ID NO: 2798 - RNA, 20 nt, synthetic construct
  misc_feature 1..20: note = source = /note="Description of Artificial Sequence: Synthetic oligonucleotide"
  source 1..20: mol_type = other RNA
cagaccctacagctgataaa

SEQ ID NO: 2799 - RNA, 20 nt, synthetic construct
  misc_feature 1..20: note = source = /note="Description of Artificial Sequence: Synthetic oligonucleotide"
  source 1..20: mol_type = other RNA
ggggataagaaggtaggagg

SEQ ID NO: 2800 - RNA, 20 nt, synthetic construct
  misc_feature 1..20: note = source = /note="Description of Artificial Sequence: Synthetic oligonucleotide"
  source 1..20: mol_type = other RNA
aagggggataagaaggtagg

SEQ ID NO: 2801 - RNA, 20 nt, synthetic construct
  misc_feature 1..20: note = source = /note="Description of Artificial Sequence: Synthetic oligonucleotide"
  source 1..20: mol_type = other RNA
ctaaagggggataagaaggt

SEQ ID NO: 2802 - RNA, 20 nt, synthetic construct
  misc_feature 1..20: note = source = /note="Description of Artificial Sequence: Synthetic oligonucleotide"
  source 1..20: mol_type = other RNA
ccccctaaagggggataaga

SEQ ID NO: 2803 - RNA, 20 nt, synthetic construct
  misc_feature 1..20: note = source = /note="Description of Artificial Sequence: Synthetic oligonucleotide"
  source 1..20: mol_type = other RNA
ttcgtacagccccctaaagg

SEQ ID NO: 2804 - RNA, 20 nt, synthetic construct
  misc_feature 1..20: note = source = /note="Description of Artificial Sequence: Synthetic oligonucleotide"
  source 1..20: mol_type = other RNA
cttcgtacagccccctaaag

SEQ ID NO: 2805 - RNA, 20 nt, synthetic construct
  misc_feature 1..20: note = source = /note="Description of Artificial Sequence: Synthetic oligonucleotide"
  source 1..20: mol_type = other RNA
acttcgtacagccccctaaa

SEQ ID NO: 2806 - RNA, 20 nt, synthetic construct
  misc_feature 1..20: note = source = /note="Description of Artificial Sequence: Synthetic oligonucleotide"
  source 1..20: mol_type = other RNA
cacttcgtacagccccctaa

SEQ ID NO: 2807 - RNA, 20 nt, synthetic construct
  misc_feature 1..20: note = source = /note="Description of Artificial Sequence: Synthetic oligonucleotide"
  source 1..20: mol_type = other RNA
taacaaaacgcgcggactta

SEQ ID NO: 2808 - RNA, 20 nt, synthetic construct
  misc_feature 1..20: note = source = /note="Description of Artificial Sequence: Synthetic oligonucleotide"
  source 1..20: mol_type = other RNA
agcgccgctaacaaaacgcg

SEQ ID NO: 2809 - RNA, 20 nt, synthetic construct
  misc_feature 1..20: note = source = /note="Description of Artificial Sequence: Synthetic oligonucleotide"
  source 1..20: mol_type = other RNA
gtgagttctggtcttgtttg

SEQ ID NO: 2810 - RNA, 20 nt, synthetic construct
  misc_feature 1..20: note = source = /note="Description of Artificial Sequence: Synthetic oligonucleotide"
  source 1..20: mol_type = other RNA
agtgagttctggtcttgttt

SEQ ID NO: 2811 - RNA, 20 nt, synthetic construct
  misc_feature 1..20: note = source = /note="Description of Artificial Sequence: Synthetic oligonucleotide"
  source 1..20: mol_type = other RNA
aagtgagttctggtcttgtt

SEQ ID NO: 2812 - RNA, 20 nt, synthetic construct
  misc_feature 1..20: note = source = /note="Description of Artificial Sequence: Synthetic oligonucleotide"
  source 1..20: mol_type = other RNA
accttgagaaaagtgagttc

SEQ ID NO: 2813 - RNA, 20 nt, synthetic construct
  misc_feature 1..20: note = source = /note="Description of Artificial Sequence: Synthetic oligonucleotide"
  source 1..20: mol_type = other RNA
catacattccccaggctgga

SEQ ID NO: 2814 - RNA, 20 nt, synthetic construct
  misc_feature 1..20: note = source = /note="Description of Artificial Sequence: Synthetic oligonucleotide"
  source 1..20: mol_type = other RNA
cttacatacattccccaggc

SEQ ID NO: 2815 - RNA, 20 nt, synthetic construct
  misc_feature 1..20: note = source = /note="Description of Artificial Sequence: Synthetic oligonucleotide"
  source 1..20: mol_type = other RNA
ttctcttacatacattcccc

SEQ ID NO: 2816 - RNA, 20 nt, synthetic construct
  misc_feature 1..20: note = source = /note="Description of Artificial Sequence: Synthetic oligonucleotide"
  source 1..20: mol_type = other RNA
ttcgggagaagcacaaagcc

SEQ ID NO: 2817 - RNA, 20 nt, synthetic construct
  misc_feature 1..20: note = source = /note="Description of Artificial Sequence: Synthetic oligonucleotide"
  source 1..20: mol_type = other RNA
attcgggagaagcacaaagc

SEQ ID NO: 2818 - RNA, 20 nt, synthetic construct
  misc_feature 1..20: note = source = /note="Description of Artificial Sequence: Synthetic oligonucleotide"
  source 1..20: mol_type = other RNA
gaaccaaacgaagctgattc

SEQ ID NO: 2819 - RNA, 20 nt, synthetic construct
  misc_feature 1..20: note = source = /note="Description of Artificial Sequence: Synthetic oligonucleotide"
  source 1..20: mol_type = other RNA
ggaaccaaacgaagctgatt

SEQ ID NO: 2820 - RNA, 20 nt, synthetic construct
  misc_feature 1..20: note = source = /note="Description of Artificial Sequence: Synthetic oligonucleotide"
  source 1..20: mol_type = other RNA
tgtctgcctgtcacttacca

SEQ ID NO: 2821 - RNA, 20 nt, synthetic construct
  misc_feature 1..20: note = source = /note="Description of Artificial Sequence: Synthetic oligonucleotide"
  source 1..20: mol_type = other RNA
ccccctcccgccccctcccc

SEQ ID NO: 2822 - RNA, 20 nt, synthetic construct
  misc_feature 1..20: note = source = /note="Description of Artificial Sequence: Synthetic oligonucleotide"
  source 1..20: mol_type = other RNA
accccctcccgccccctccc

SEQ ID NO: 2823 - RNA, 20 nt, synthetic construct
  misc_feature 1..20: note = source = /note="Description of Artificial Sequence: Synthetic oligonucleotide"
  source 1..20: mol_type = other RNA
ggattgggtttcatttcttt

SEQ ID NO: 2824 - RNA, 20 nt, synthetic construct
  misc_feature 1..20: note = source = /note="Description of Artificial Sequence: Synthetic oligonucleotide"
  source 1..20: mol_type = other RNA
ttcacttctttgctgggatt

SEQ ID NO: 2825 - RNA, 20 nt, synthetic construct
  misc_feature 1..20: note = source = /note="Description of Artificial Sequence: Synthetic oligonucleotide"
  source 1..20: mol_type = other RNA
cttcacttctttgctgggat

SEQ ID NO: 2826 - RNA, 20 nt, synthetic construct
  misc_feature 1..20: note = source = /note="Description of Artificial Sequence: Synthetic oligonucleotide"
  source 1..20: mol_type = other RNA
ctgctcttcacttctttgct

SEQ ID NO: 2827 - RNA, 20 nt, synthetic construct
  misc_feature 1..20: note = source = /note="Description of Artificial Sequence: Synthetic oligonucleotide"
  source 1..20: mol_type = other RNA
tctgctcttcacttctttgc

SEQ ID NO: 2828 - RNA, 20 nt, synthetic construct
  misc_feature 1..20: note = source = /note="Description of Artificial Sequence: Synthetic oligonucleotide"
  source 1..20: mol_type = other RNA
tcggtttctctaatttggat

SEQ ID NO: 2829 - RNA, 20 nt, synthetic construct
  misc_feature 1..20: note = source = /note="Description of Artificial Sequence: Synthetic oligonucleotide"
  source 1..20: mol_type = other RNA
ttcggtttctctaatttgga

SEQ ID NO: 2830 - RNA, 20 nt, synthetic construct
  misc_feature 1..20: note = source = /note="Description of Artificial Sequence: Synthetic oligonucleotide"
  source 1..20: mol_type = other RNA
tctcttcggtttctctaatt

SEQ ID NO: 2831 - RNA, 20 nt, synthetic construct
  misc_feature 1..20: note = source = /note="Description of Artificial Sequence: Synthetic oligonucleotide"
  source 1..20: mol_type = other RNA
ctctcctctgtgtctctctt

SEQ ID NO: 2832 - RNA, 20 nt, synthetic construct
  misc_feature 1..20: note = source = /note="Description of Artificial Sequence: Synthetic oligonucleotide"
  source 1..20: mol_type = other RNA
tctctcttctttctcatctc

SEQ ID NO: 2833 - RNA, 20 nt, synthetic construct
  misc_feature 1..20: note = source = /note="Description of Artificial Sequence: Synthetic oligonucleotide"
  source 1..20: mol_type = other RNA
gattcagcaagatgcgagtg

SEQ ID NO: 2834 - RNA, 20 nt, synthetic construct
  misc_feature 1..20: note = source = /note="Description of Artificial Sequence: Synthetic oligonucleotide"
  source 1..20: mol_type = other RNA
gccacacttcattatgtcat

SEQ ID NO: 2835 - RNA, 20 nt, synthetic construct
  misc_feature 1..20: note = source = /note="Description of Artificial Sequence: Synthetic oligonucleotide"
  source 1..20: mol_type = other RNA
gcctttccaggagtctatcc

SEQ ID NO: 2836 - RNA, 20 nt, synthetic construct
  misc_feature 1..20: note = source = /note="Description of Artificial Sequence: Synthetic oligonucleotide"
  source 1..20: mol_type = other RNA
atttcattttcggcctttcc

SEQ ID NO: 2837 - RNA, 20 nt, synthetic construct
  misc_feature 1..20: note = source = /note="Description of Artificial Sequence: Synthetic oligonucleotide"
  source 1..20: mol_type = other RNA
taacacttatatttcatttt

SEQ ID NO: 2838 - RNA, 20 nt, synthetic construct
  misc_feature 1..20: note = source = /note="Description of Artificial Sequence: Synthetic oligonucleotide"
  source 1..20: mol_type = other RNA
aattaaaagtatatcatgag

SEQ ID NO: 2839 - RNA, 20 nt, synthetic construct
  misc_feature 1..20: note = source = /note="Description of Artificial Sequence: Synthetic oligonucleotide"
  source 1..20: mol_type = other RNA
taattaaaagtatatcatga

SEQ ID NO: 2840 - RNA, 20 nt, synthetic construct
  misc_feature 1..20: note = source = /note="Description of Artificial Sequence: Synthetic oligonucleotide"
  source 1..20: mol_type = other RNA
gtaattaaaagtatatcatg

SEQ ID NO: 2841 - RNA, 20 nt, synthetic construct
  misc_feature 1..20: note = source = /note="Description of Artificial Sequence: Synthetic oligonucleotide"
  source 1..20: mol_type = other RNA
cttaaacattagatgaagaa

SEQ ID NO: 2842 - RNA, 20 nt, synthetic construct
  misc_feature 1..20: note = source = /note="Description of Artificial Sequence: Synthetic oligonucleotide"
  source 1..20: mol_type = other RNA
tcttaaacattagatgaaga

SEQ ID NO: 2843 - RNA, 20 nt, synthetic construct
  misc_feature 1..20: note = source = /note="Description of Artificial Sequence: Synthetic oligonucleotide"
  source 1..20: mol_type = other RNA
tatgcactaaattttaccgc

SEQ ID NO: 2844 - RNA, 20 nt, synthetic construct
  misc_feature 1..20: note = source = /note="Description of Artificial Sequence: Synthetic oligonucleotide"
  source 1..20: mol_type = other RNA
attataatccctgactgaag

SEQ ID NO: 2845 - RNA, 20 nt, synthetic construct
  misc_feature 1..20: note = source = /note="Description of Artificial Sequence: Synthetic oligonucleotide"
  source 1..20: mol_type = other RNA
cattataatccctgactgaa

SEQ ID NO: 2846 - RNA, 20 nt, synthetic construct
  misc_feature 1..20: note = source = /note="Description of Artificial Sequence: Synthetic oligonucleotide"
  source 1..20: mol_type = other RNA
ccattataatccctgactga

SEQ ID NO: 2847 - RNA, 20 nt, synthetic construct
  misc_feature 1..20: note = source = /note="Description of Artificial Sequence: Synthetic oligonucleotide"
  source 1..20: mol_type = other RNA
tgatgaatatctttgaattt

SEQ ID NO: 2848 - RNA, 20 nt, synthetic construct
  misc_feature 1..20: note = source = /note="Description of Artificial Sequence: Synthetic oligonucleotide"
  source 1..20: mol_type = other RNA
ttgatgaatatctttgaatt

SEQ ID NO: 2849 - RNA, 20 nt, synthetic construct
  misc_feature 1..20: note = source = /note="Description of Artificial Sequence: Synthetic oligonucleotide"
  source 1..20: mol_type = other RNA
atacaatcttattcctatga

SEQ ID NO: 2850 - RNA, 20 nt, synthetic construct
  misc_feature 1..20: note = source = /note="Description of Artificial Sequence: Synthetic oligonucleotide"
  source 1..20: mol_type = other RNA
atgtaatgatttcattagcc

SEQ ID NO: 2851 - RNA, 20 nt, synthetic construct
  misc_feature 1..20: note = source = /note="Description of Artificial Sequence: Synthetic oligonucleotide"
  source 1..20: mol_type = other RNA
agttttggaaattcgactta

SEQ ID NO: 2852 - RNA, 20 nt, synthetic construct
  misc_feature 1..20: note = source = /note="Description of Artificial Sequence: Synthetic oligonucleotide"
  source 1..20: mol_type = other RNA
ctatcgaggacaaatagttt

SEQ ID NO: 2853 - RNA, 20 nt, synthetic construct
  misc_feature 1..20: note = source = /note="Description of Artificial Sequence: Synthetic oligonucleotide"
  source 1..20: mol_type = other RNA
agttacaaagtgaactatcg

SEQ ID NO: 2854 - RNA, 20 nt, synthetic construct
  misc_feature 1..20: note = source = /note="Description of Artificial Sequence: Synthetic oligonucleotide"
  source 1..20: mol_type = other RNA
taatttttgttttaatttta

SEQ ID NO: 2855 - RNA, 20 nt, synthetic construct
  misc_feature 1..20: note = source = /note="Description of Artificial Sequence: Synthetic oligonucleotide"
  source 1..20: mol_type = other RNA
ctaatttttgttttaatttt

SEQ ID NO: 2856 - RNA, 20 nt, synthetic construct
  misc_feature 1..20: note = source = /note="Description of Artificial Sequence: Synthetic oligonucleotide"
  source 1..20: mol_type = other RNA
tttaccatgaacagcattaa

SEQ ID NO: 2857 - RNA, 20 nt, synthetic construct
  misc_feature 1..20: note = source = /note="Description of Artificial Sequence: Synthetic oligonucleotide"
  source 1..20: mol_type = other RNA
tgtttttaattctgaattgc

SEQ ID NO: 2858 - RNA, 20 nt, synthetic construct
  misc_feature 1..20: note = source = /note="Description of Artificial Sequence: Synthetic oligonucleotide"
  source 1..20: mol_type = other RNA
aatattagtttgttagcaaa

SEQ ID NO: 2859 - RNA, 20 nt, synthetic construct
  misc_feature 1..20: note = source = /note="Description of Artificial Sequence: Synthetic oligonucleotide"
  source 1..20: mol_type = other RNA
agttattcttatttattgag

SEQ ID NO: 2860 - RNA, 20 nt, synthetic construct
  misc_feature 1..20: note = source = /note="Description of Artificial Sequence: Synthetic oligonucleotide"
  source 1..20: mol_type = other RNA
aagaatctaaatttgatgac

SEQ ID NO: 2861 - RNA, 20 nt, synthetic construct
  misc_feature 1..20: note = source = /note="Description of Artificial Sequence: Synthetic oligonucleotide"
  source 1..20: mol_type = other RNA
gctattttcagtataaaagt

SEQ ID NO: 2862 - RNA, 20 nt, synthetic construct
  misc_feature 1..20: note = source = /note="Description of Artificial Sequence: Synthetic oligonucleotide"
  source 1..20: mol_type = other RNA
taatttctcttttccaacaa

SEQ ID NO: 2863 - RNA, 20 nt, synthetic construct
  misc_feature 1..20: note = source = /note="Description of Artificial Sequence: Synthetic oligonucleotide"
  source 1..20: mol_type = other RNA
atatggtaaagaaagaactg

SEQ ID NO: 2864 - RNA, 20 nt, synthetic construct
  misc_feature 1..20: note = source = /note="Description of Artificial Sequence: Synthetic oligonucleotide"
  source 1..20: mol_type = other RNA
aggtagtatgatcacatata

SEQ ID NO: 2865 - RNA, 20 nt, synthetic construct
  misc_feature 1..20: note = source = /note="Description of Artificial Sequence: Synthetic oligonucleotide"
  source 1..20: mol_type = other RNA
atggaatttttggagcacct

SEQ ID NO: 2866 - RNA, 20 nt, synthetic construct
  misc_feature 1..20: note = source = /note="Description of Artificial Sequence: Synthetic oligonucleotide"
  source 1..20: mol_type = other RNA
agacagtcctatggaatttt

SEQ ID NO: 2867 - RNA, 20 nt, synthetic construct
  misc_feature 1..20: note = source = /note="Description of Artificial Sequence: Synthetic oligonucleotide"
  source 1..20: mol_type = other RNA
aataacccaagacagtccta

SEQ ID NO: 2868 - RNA, 20 nt, synthetic construct
  misc_feature 1..20: note = source = /note="Description of Artificial Sequence: Synthetic oligonucleotide"
  source 1..20: mol_type = other RNA
tgacaatttaaacaaagcaa

SEQ ID NO: 2869 - RNA, 20 nt, synthetic construct
  misc_feature 1..20: note = source = /note="Description of Artificial Sequence: Synthetic oligonucleotide"
  source 1..20: mol_type = other RNA
atgacaatttaaacaaagca

SEQ ID NO: 2870 - RNA, 20 nt, synthetic construct
  misc_feature 1..20: note = source = /note="Description of Artificial Sequence: Synthetic oligonucleotide"
  source 1..20: mol_type = other RNA
ttaaagccttaagaagagtt

SEQ ID NO: 2871 - RNA, 20 nt, synthetic construct
  misc_feature 1..20: note = source = /note="Description of Artificial Sequence: Synthetic oligonucleotide"
  source 1..20: mol_type = other RNA
ctccggcttctggcataaac

SEQ ID NO: 2872 - RNA, 20 nt, synthetic construct
  misc_feature 1..20: note = source = /note="Description of Artificial Sequence: Synthetic oligonucleotide"
  source 1..20: mol_type = other RNA
atatcaattcctccggcttc

SEQ ID NO: 2873 - RNA, 20 nt, synthetic construct
  misc_feature 1..20: note = source = /note="Description of Artificial Sequence: Synthetic oligonucleotide"
  source 1..20: mol_type = other RNA
caaaatcatatcaattcctc

SEQ ID NO: 2874 - RNA, 20 nt, synthetic construct
  misc_feature 1..20: note = source = /note="Description of Artificial Sequence: Synthetic oligonucleotide"
  source 1..20: mol_type = other RNA
ttcacttgccaatgtctagt

SEQ ID NO: 2875 - RNA, 20 nt, synthetic construct
  misc_feature 1..20: note = source = /note="Description of Artificial Sequence: Synthetic oligonucleotide"
  source 1..20: mol_type = other RNA
caggtgcacttcacttgttc

SEQ ID NO: 2876 - RNA, 20 nt, synthetic construct
  misc_feature 1..20: note = source = /note="Description of Artificial Sequence: Synthetic oligonucleotide"
  source 1..20: mol_type = other RNA
tttcataacaactccttggc

SEQ ID NO: 2877 - RNA, 20 nt, synthetic construct
  misc_feature 1..20: note = source = /note="Description of Artificial Sequence: Synthetic oligonucleotide"
  source 1..20: mol_type = other RNA
attctttcataacaactcct

SEQ ID NO: 2878 - RNA, 20 nt, synthetic construct
  misc_feature 1..20: note = source = /note="Description of Artificial Sequence: Synthetic oligonucleotide"
  source 1..20: mol_type = other RNA
ccagtgcccaataaggactt

SEQ ID NO: 2879 - RNA, 20 nt, synthetic construct
  misc_feature 1..20: note = source = /note="Description of Artificial Sequence: Synthetic oligonucleotide"
  source 1..20: mol_type = other RNA
tacaagaccagtgcccaata

SEQ ID NO: 2880 - RNA, 20 nt, synthetic construct
  misc_feature 1..20: note = source = /note="Description of Artificial Sequence: Synthetic oligonucleotide"
  source 1..20: mol_type = other RNA
gagtcttagaagaattgata

SEQ ID NO: 2881 - RNA, 20 nt, synthetic construct
  misc_feature 1..20: note = source = /note="Description of Artificial Sequence: Synthetic oligonucleotide"
  source 1..20: mol_type = other RNA
ggagtcttagaagaattgat

SEQ ID NO: 2882 - RNA, 20 nt, synthetic construct
  misc_feature 1..20: note = source = /note="Description of Artificial Sequence: Synthetic oligonucleotide"
  source 1..20: mol_type = other RNA
cttacaacattgtttggggg

SEQ ID NO: 2883 - RNA, 20 nt, synthetic construct
  misc_feature 1..20: note = source = /note="Description of Artificial Sequence: Synthetic oligonucleotide"
  source 1..20: mol_type = other RNA
tgacttacaacattgtttgg

SEQ ID NO: 2884 - RNA, 20 nt, synthetic construct
  misc_feature 1..20: note = source = /note="Description of Artificial Sequence: Synthetic oligonucleotide"
  source 1..20: mol_type = other RNA
ttgacttacaacattgtttg

SEQ ID NO: 2885 - RNA, 20 nt, synthetic construct
  misc_feature 1..20: note = source = /note="Description of Artificial Sequence: Synthetic oligonucleotide"
  source 1..20: mol_type = other RNA
tttgacttacaacattgttt

SEQ ID NO: 2886 - RNA, 20 nt, synthetic construct
  misc_feature 1..20: note = source = /note="Description of Artificial Sequence: Synthetic oligonucleotide"
  source 1..20: mol_type = other RNA
atttgacttacaacattgtt

SEQ ID NO: 2887 - RNA, 20 nt, synthetic construct
  misc_feature 1..20: note = source = /note="Description of Artificial Sequence: Synthetic oligonucleotide"
  source 1..20: mol_type = other RNA
cttaatgaggtcagtaatta

SEQ ID NO: 2888 - RNA, 20 nt, synthetic construct
  misc_feature 1..20: note = source = /note="Description of Artificial Sequence: Synthetic oligonucleotide"
  source 1..20: mol_type = other RNA
ataagaagggcttcttaatg

SEQ ID NO: 2889 - RNA, 20 nt, synthetic construct
  misc_feature 1..20: note = source = /note="Description of Artificial Sequence: Synthetic oligonucleotide"
  source 1..20: mol_type = other RNA
gtgcctatgaatcataagaa

SEQ ID NO: 2890 - RNA, 20 nt, synthetic construct
  misc_feature 1..20: note = source = /note="Description of Artificial Sequence: Synthetic oligonucleotide"
  source 1..20: mol_type = other RNA
tgtgcctatgaatcataaga

SEQ ID NO: 2891 - RNA, 20 nt, synthetic construct
  misc_feature 1..20: note = source = /note="Description of Artificial Sequence: Synthetic oligonucleotide"
  source 1..20: mol_type = other RNA
tggaaaatagagtttctgtg

SEQ ID NO: 2892 - RNA, 20 nt, synthetic construct
  misc_feature 1..20: note = source = /note="Description of Artificial Sequence: Synthetic oligonucleotide"
  source 1..20: mol_type = other RNA
tactcagactttgggcagga

SEQ ID NO: 2893 - RNA, 20 nt, synthetic construct
  misc_feature 1..20: note = source = /note="Description of Artificial Sequence: Synthetic oligonucleotide"
  source 1..20: mol_type = other RNA
tacctactcagactttgggc

SEQ ID NO: 2894 - RNA, 20 nt, synthetic construct
  misc_feature 1..20: note = source = /note="Description of Artificial Sequence: Synthetic oligonucleotide"
  source 1..20: mol_type = other RNA
aatttacctactcagacttt

SEQ ID NO: 2895 - RNA, 20 nt, synthetic construct
  misc_feature 1..20: note = source = /note="Description of Artificial Sequence: Synthetic oligonucleotide"
  source 1..20: mol_type = other RNA
gaatttacctactcagactt

SEQ ID NO: 2896 - RNA, 20 nt, synthetic construct
  misc_feature 1..20: note = source = /note="Description of Artificial Sequence: Synthetic oligonucleotide"
  source 1..20: mol_type = other RNA
tttgaagatattttatttca

SEQ ID NO: 2897 - RNA, 20 nt, synthetic construct
  misc_feature 1..20: note = source = /note="Description of Artificial Sequence: Synthetic oligonucleotide"
  source 1..20: mol_type = other RNA
taacattaaaacagtctaca

SEQ ID NO: 2898 - RNA, 20 nt, synthetic construct
  misc_feature 1..20: note = source = /note="Description of Artificial Sequence: Synthetic oligonucleotide"
  source 1..20: mol_type = other RNA
ttttagcctgttcccaaggt

SEQ ID NO: 2899 - RNA, 20 nt, synthetic construct
  misc_feature 1..20: note = source = /note="Description of Artificial Sequence: Synthetic oligonucleotide"
  source 1..20: mol_type = other RNA
aaagttttagcctgttccca

SEQ ID NO: 2900 - RNA, 20 nt, synthetic construct
  misc_feature 1..20: note = source = /note="Description of Artificial Sequence: Synthetic oligonucleotide"
  source 1..20: mol_type = other RNA
gatgaacaaatactgacagc

SEQ ID NO: 2901 - RNA, 20 nt, synthetic construct
  misc_feature 1..20: note = source = /note="Description of Artificial Sequence: Synthetic oligonucleotide"
  source 1..20: mol_type = other RNA
ccttaagaactactgtgcaa

SEQ ID NO: 2902 - RNA, 20 nt, synthetic construct
  misc_feature 1..20: note = source = /note="Description of Artificial Sequence: Synthetic oligonucleotide"
  source 1..20: mol_type = other RNA
tattctattgctgctggctt

SEQ ID NO: 2903 - RNA, 20 nt, synthetic construct
  misc_feature 1..20: note = source = /note="Description of Artificial Sequence: Synthetic oligonucleotide"
  source 1..20: mol_type = other RNA
gggagatattctattgctgc

SEQ ID NO: 2904 - RNA, 20 nt, synthetic construct
  misc_feature 1..20: note = source = /note="Description of Artificial Sequence: Synthetic oligonucleotide"
  source 1..20: mol_type = other RNA
tccaattgtaaagttggctt

SEQ ID NO: 2905 - RNA, 20 nt, synthetic construct
  misc_feature 1..20: note = source = /note="Description of Artificial Sequence: Synthetic oligonucleotide"
  source 1..20: mol_type = other RNA
ctccaattgtaaagttggct

SEQ ID NO: 2906 - RNA, 20 nt, synthetic construct
  misc_feature 1..20: note = source = /note="Description of Artificial Sequence: Synthetic oligonucleotide"
  source 1..20: mol_type = other RNA
gaaggctccaattgtaaagt

SEQ ID NO: 2907 - RNA, 20 nt, synthetic construct
  misc_feature 1..20: note = source = /note="Description of Artificial Sequence: Synthetic oligonucleotide"
  source 1..20: mol_type = other RNA
actggtctttcccacagtga

SEQ ID NO: 2908 - RNA, 20 nt, synthetic construct
  misc_feature 1..20: note = source = /note="Description of Artificial Sequence: Synthetic oligonucleotide"
  source 1..20: mol_type = other RNA
caccagctctacttggcaac

SEQ ID NO: 2909 - RNA, 20 nt, synthetic construct
  misc_feature 1..20: note = source = /note="Description of Artificial Sequence: Synthetic oligonucleotide"
  source 1..20: mol_type = other RNA
agataaccaccagctctact

SEQ ID NO: 2910 - RNA, 20 nt, synthetic construct
  misc_feature 1..20: note = source = /note="Description of Artificial Sequence: Synthetic oligonucleotide"
  source 1..20: mol_type = other RNA
atatttggcaaaatcatttg

SEQ ID NO: 2911 - RNA, 20 nt, synthetic construct
  misc_feature 1..20: note = source = /note="Description of Artificial Sequence: Synthetic oligonucleotide"
  source 1..20: mol_type = other RNA
ccaagtaaatactgtatatt

SEQ ID NO: 2912 - RNA, 20 nt, synthetic construct
  misc_feature 1..20: note = source = /note="Description of Artificial Sequence: Synthetic oligonucleotide"
  source 1..20: mol_type = other RNA
cagtgagtagaaatagaaat

SEQ ID NO: 2913 - RNA, 20 nt, synthetic construct
  misc_feature 1..20: note = source = /note="Description of Artificial Sequence: Synthetic oligonucleotide"
  source 1..20: mol_type = other RNA
tcacagtattcactcagttt

SEQ ID NO: 2914 - RNA, 20 nt, synthetic construct
  misc_feature 1..20: note = source = /note="Description of Artificial Sequence: Synthetic oligonucleotide"
  source 1..20: mol_type = other RNA
tgactttcccctttccctcc

SEQ ID NO: 2915 - RNA, 20 nt, synthetic construct
  misc_feature 1..20: note = source = /note="Description of Artificial Sequence: Synthetic oligonucleotide"
  source 1..20: mol_type = other RNA
cagacatacataattctttt

SEQ ID NO: 2916 - RNA, 20 nt, synthetic construct
  misc_feature 1..20: note = source = /note="Description of Artificial Sequence: Synthetic oligonucleotide"
  source 1..20: mol_type = other RNA
atataggacaaaaataatgc

SEQ ID NO: 2917 - RNA, 20 nt, synthetic construct
  misc_feature 1..20: note = source = /note="Description of Artificial Sequence: Synthetic oligonucleotide"
  source 1..20: mol_type = other RNA
gtctctgcaatgtacaatat

SEQ ID NO: 2918 - RNA, 20 nt, synthetic construct
  misc_feature 1..20: note = source = /note="Description of Artificial Sequence: Synthetic oligonucleotide"
  source 1..20: mol_type = other RNA
ccaaaatttgttatttggaa

SEQ ID NO: 2919 - RNA, 20 nt, synthetic construct
  misc_feature 1..20: note = source = /note="Description of Artificial Sequence: Synthetic oligonucleotide"
  source 1..20: mol_type = other RNA
gggatccaaaatttgttatt

SEQ ID NO: 2920 - RNA, 20 nt, synthetic construct
  misc_feature 1..20: note = source = /note="Description of Artificial Sequence: Synthetic oligonucleotide"
  source 1..20: mol_type = other RNA
agggtttcacgatcctaatg

SEQ ID NO: 2921 - RNA, 20 nt, synthetic construct
  misc_feature 1..20: note = source = /note="Description of Artificial Sequence: Synthetic oligonucleotide"
  source 1..20: mol_type = other RNA
ggaaccggagggtttcacga

SEQ ID NO: 2922 - RNA, 20 nt, synthetic construct
  misc_feature 1..20: note = source = /note="Description of Artificial Sequence: Synthetic oligonucleotide"
  source 1..20: mol_type = other RNA
ggagttcactagagagtgga

SEQ ID NO: 2923 - RNA, 20 nt, synthetic construct
  misc_feature 1..20: note = source = /note="Description of Artificial Sequence: Synthetic oligonucleotide"
  source 1..20: mol_type = other RNA
ggtcccaccaaagtttgagg

SEQ ID NO: 2924 - RNA, 20 nt, synthetic construct
  misc_feature 1..20: note = source = /note="Description of Artificial Sequence: Synthetic oligonucleotide"
  source 1..20: mol_type = other RNA
ggactgacacaacgggtccc

SEQ ID NO: 2925 - RNA, 20 nt, synthetic construct
  misc_feature 1..20: note = source = /note="Description of Artificial Sequence: Synthetic oligonucleotide"
  source 1..20: mol_type = other RNA
cccggactgacacaacgggt

SEQ ID NO: 2926 - RNA, 20 nt, synthetic construct
  misc_feature 1..20: note = source = /note="Description of Artificial Sequence: Synthetic oligonucleotide"
  source 1..20: mol_type = other RNA
ccccggactgacacaacggg

SEQ ID NO: 2927 - RNA, 20 nt, synthetic construct
  misc_feature 1..20: note = source = /note="Description of Artificial Sequence: Synthetic oligonucleotide"
  source 1..20: mol_type = other RNA
atttaaaaaacatctctgac

SEQ ID NO: 2928 - RNA, 20 nt, synthetic construct
  misc_feature 1..20: note = source = /note="Description of Artificial Sequence: Synthetic oligonucleotide"
  source 1..20: mol_type = other RNA
aatttaaaaaacatctctga

SEQ ID NO: 2929 - RNA, 20 nt, synthetic construct
  misc_feature 1..20: note = source = /note="Description of Artificial Sequence: Synthetic oligonucleotide"
  source 1..20: mol_type = other RNA
aaatttaaaaaacatctctg

SEQ ID NO: 2930 - RNA, 20 nt, synthetic construct
  misc_feature 1..20: note = source = /note="Description of Artificial Sequence: Synthetic oligonucleotide"
  source 1..20: mol_type = other RNA
aggactcatcgaccctgatg

SEQ ID NO: 2931 - RNA, 20 nt, synthetic construct
  misc_feature 1..20: note = source = /note="Description of Artificial Sequence: Synthetic oligonucleotide"
  source 1..20: mol_type = other RNA
agagtcagaggactcatcga

SEQ ID NO: 2932 - RNA, 20 nt, synthetic construct
  misc_feature 1..20: note = source = /note="Description of Artificial Sequence: Synthetic oligonucleotide"
  source 1..20: mol_type = other RNA
tagagtcagaggactcatcg

SEQ ID NO: 2933 - RNA, 20 nt, synthetic construct
  misc_feature 1..20: note = source = /note="Description of Artificial Sequence: Synthetic oligonucleotide"
  source 1..20: mol_type = other RNA
aacggacccgacctcgcgtc

SEQ ID NO: 2934 - RNA, 20 nt, synthetic construct
  misc_feature 1..20: note = source = /note="Description of Artificial Sequence: Synthetic oligonucleotide"
  source 1..20: mol_type = other RNA
agagagggagaacggacccg

SEQ ID NO: 2935 - RNA, 20 nt, synthetic construct
  misc_feature 1..20: note = source = /note="Description of Artificial Sequence: Synthetic oligonucleotide"
  source 1..20: mol_type = other RNA
tcccagagagggagaacgga

SEQ ID NO: 2936 - RNA, 20 nt, synthetic construct
  misc_feature 1..20: note = source = /note="Description of Artificial Sequence: Synthetic oligonucleotide"
  source 1..20: mol_type = other RNA
atcccagagagggagaacgg

SEQ ID NO: 2937 - RNA, 20 nt, synthetic construct
  misc_feature 1..20: note = source = /note="Description of Artificial Sequence: Synthetic oligonucleotide"
  source 1..20: mol_type = other RNA
acaacacgctgaaactctat

SEQ ID NO: 2938 - RNA, 20 nt, synthetic construct
  misc_feature 1..20: note = source = /note="Description of Artificial Sequence: Synthetic oligonucleotide"
  source 1..20: mol_type = other RNA
aacaacacgctgaaactcta

SEQ ID NO: 2939 - RNA, 20 nt, synthetic construct
  misc_feature 1..20: note = source = /note="Description of Artificial Sequence: Synthetic oligonucleotide"
  source 1..20: mol_type = other RNA
aatgtgcttaaaacaaacaa

SEQ ID NO: 2940 - RNA, 20 nt, synthetic construct
  misc_feature 1..20: note = source = /note="Description of Artificial Sequence: Synthetic oligonucleotide"
  source 1..20: mol_type = other RNA
gaattcttaaaactgcaggt

SEQ ID NO: 2941 - RNA, 20 nt, synthetic construct
  misc_feature 1..20: note = source = /note="Description of Artificial Sequence: Synthetic oligonucleotide"
  source 1..20: mol_type = other RNA
ttctgaattcttaaaactgc

SEQ ID NO: 2942 - RNA, 20 nt, synthetic construct
  misc_feature 1..20: note = source = /note="Description of Artificial Sequence: Synthetic oligonucleotide"
  source 1..20: mol_type = other RNA
ggtcttactcggtggtgtgg

SEQ ID NO: 2943 - RNA, 20 nt, synthetic construct
  misc_feature 1..20: note = source = /note="Description of Artificial Sequence: Synthetic oligonucleotide"
  source 1..20: mol_type = other RNA
ggtccgaccagatcttgaag

SEQ ID NO: 2944 - RNA, 20 nt, synthetic construct
  misc_feature 1..20: note = source = /note="Description of Artificial Sequence: Synthetic oligonucleotide"
  source 1..20: mol_type = other RNA
agagtgatacaacgggtccg

SEQ ID NO: 2945 - RNA, 20 nt, synthetic construct
  misc_feature 1..20: note = source = /note="Description of Artificial Sequence: Synthetic oligonucleotide"
  source 1..20: mol_type = other RNA
ccatagagtgatacaacggg

SEQ ID NO: 2946 - RNA, 20 nt, synthetic construct
  misc_feature 1..20: note = source = /note="Description of Artificial Sequence: Synthetic oligonucleotide"
  source 1..20: mol_type = other RNA
ataaaaataacttatctctg

SEQ ID NO: 2947 - RNA, 20 nt, synthetic construct
  misc_feature 1..20: note = source = /note="Description of Artificial Sequence: Synthetic oligonucleotide"
  source 1..20: mol_type = other RNA
atgatttcaagtcagtttag

SEQ ID NO: 2948 - RNA, 20 nt, synthetic construct
  misc_feature 1..20: note = source = /note="Description of Artificial Sequence: Synthetic oligonucleotide"
  source 1..20: mol_type = other RNA
actttaattctcagtttatt

SEQ ID NO: 2949 - RNA, 20 nt, synthetic construct
  misc_feature 1..20: note = source = /note="Description of Artificial Sequence: Synthetic oligonucleotide"
  source 1..20: mol_type = other RNA
gtccgtactcggtggtgttg

SEQ ID NO: 2950 - RNA, 20 nt, synthetic construct
  misc_feature 1..20: note = source = /note="Description of Artificial Sequence: Synthetic oligonucleotide"
  source 1..20: mol_type = other RNA
agggtttcacgaccctaatg

SEQ ID NO: 2951 - RNA, 20 nt, synthetic construct
  misc_feature 1..20: note = source = /note="Description of Artificial Sequence: Synthetic oligonucleotide"
  source 1..20: mol_type = other RNA
ggaacagcagggtttcacga

SEQ ID NO: 2952 - RNA, 20 nt, synthetic construct
  misc_feature 1..20: note = source = /note="Description of Artificial Sequence: Synthetic oligonucleotide"
  source 1..20: mol_type = other RNA
cggaacagcagggtttcacg

SEQ ID NO: 2953 - RNA, 20 nt, synthetic construct
  misc_feature 1..20: note = source = /note="Description of Artificial Sequence: Synthetic oligonucleotide"
  source 1..20: mol_type = other RNA
ccagagtttgaggactggag

SEQ ID NO: 2954 - RNA, 20 nt, synthetic construct
  misc_feature 1..20: note = source = /note="Description of Artificial Sequence: Synthetic oligonucleotide"
  source 1..20: mol_type = other RNA
aaagtggtacaaccggtccg

SEQ ID NO: 2955 - RNA, 20 nt, synthetic construct
  misc_feature 1..20: note = source = /note="Description of Artificial Sequence: Synthetic oligonucleotide"
  source 1..20: mol_type = other RNA
tcccaaagtggtacaaccgg

SEQ ID NO: 2956 - RNA, 20 nt, synthetic construct
  misc_feature 1..20: note = source = /note="Description of Artificial Sequence: Synthetic oligonucleotide"
  source 1..20: mol_type = other RNA
ctctgtcccaaagtggtaca

SEQ ID NO: 2957 - RNA, 20 nt, synthetic construct
  misc_feature 1..20: note = source = /note="Description of Artificial Sequence: Synthetic oligonucleotide"
  source 1..20: mol_type = other RNA
aacataaaaatcatctctgt

SEQ ID NO: 2958 - RNA, 20 nt, synthetic construct
  misc_feature 1..20: note = source = /note="Description of Artificial Sequence: Synthetic oligonucleotide"
  source 1..20: mol_type = other RNA
aaacataaaaatcatctctg

SEQ ID NO: 2959 - RNA, 20 nt, synthetic construct
  misc_feature 1..20: note = source = /note="Description of Artificial Sequence: Synthetic oligonucleotide"
  source 1..20: mol_type = other RNA
gaccacacacggtggtacgg

SEQ ID NO: 2960 - RNA, 20 nt, synthetic construct
  misc_feature 1..20: note = source = /note="Description of Artificial Sequence: Synthetic oligonucleotide"
  source 1..20: mol_type = other RNA
aggactcatcgaccctaatg

SEQ ID NO: 2961 - RNA, 20 nt, synthetic construct
  misc_feature 1..20: note = source = /note="Description of Artificial Sequence: Synthetic oligonucleotide"
  source 1..20: mol_type = other RNA
ggagtcggaggactcatcga

SEQ ID NO: 2962 - RNA, 20 nt, synthetic construct
  misc_feature 1..20: note = source = /note="Description of Artificial Sequence: Synthetic oligonucleotide"
  source 1..20: mol_type = other RNA
cggagtcggaggactcatcg

SEQ ID NO: 2963 - RNA, 20 nt, synthetic construct
  misc_feature 1..20: note = source = /note="Description of Artificial Sequence: Synthetic oligonucleotide"
  source 1..20: mol_type = other RNA
gggtccgagttcactaagag

SEQ ID NO: 2964 - RNA, 20 nt, synthetic construct
  misc_feature 1..20: note = source = /note="Description of Artificial Sequence: Synthetic oligonucleotide"
  source 1..20: mol_type = other RNA
cgggtccgagttcactaaga

SEQ ID NO: 2965 - RNA, 20 nt, synthetic construct
  misc_feature 1..20: note = source = /note="Description of Artificial Sequence: Synthetic oligonucleotide"
  source 1..20: mol_type = other RNA
tccatactcggtggtacggg

SEQ ID NO: 2966 - RNA, 20 nt, synthetic construct
  misc_feature 1..20: note = source = /note="Description of Artificial Sequence: Synthetic oligonucleotide"
  source 1..20: mol_type = other RNA
agggtttcacgaccctaata

SEQ ID NO: 2967 - RNA, 20 nt, synthetic construct
  misc_feature 1..20: note = source = /note="Description of Artificial Sequence: Synthetic oligonucleotide"
  source 1..20: mol_type = other RNA
ggagccggagggtttcacga

SEQ ID NO: 2968 - RNA, 20 nt, synthetic construct
  misc_feature 1..20: note = source = /note="Description of Artificial Sequence: Synthetic oligonucleotide"
  source 1..20: mol_type = other RNA
cggagccggagggtttcacg

SEQ ID NO: 2969 - RNA, 20 nt, synthetic construct
  misc_feature 1..20: note = source = /note="Description of Artificial Sequence: Synthetic oligonucleotide"
  source 1..20: mol_type = other RNA
cagtccactaggtggacgga

SEQ ID NO: 2970 - RNA, 20 nt, synthetic construct
  misc_feature 1..20: note = source = /note="Description of Artificial Sequence: Synthetic oligonucleotide"
  source 1..20: mol_type = other RNA
ccagagcttaaggactgcag

SEQ ID NO: 2971 - RNA, 20 nt, synthetic construct
  misc_feature 1..20: note = source = /note="Description of Artificial Sequence: Synthetic oligonucleotide"
  source 1..20: mol_type = other RNA
aaagtggtacaaccggtctg

SEQ ID NO: 2972 - RNA, 20 nt, synthetic construct
  misc_feature 1..20: note = source = /note="Description of Artificial Sequence: Synthetic oligonucleotide"
  source 1..20: mol_type = other RNA
ctctaccccaaagtggtaca

SEQ ID NO: 2973 - RNA, 20 nt, synthetic construct
  misc_feature 1..20: note = source = /note="Description of Artificial Sequence: Synthetic oligonucleotide"
  source 1..20: mol_type = other RNA
aacatacaaatcacctctac

SEQ ID NO: 2974 - RNA, 20 nt, synthetic construct
  misc_feature 1..20: note = source = /note="Description of Artificial Sequence: Synthetic oligonucleotide"
  source 1..20: mol_type = other RNA
aaacatacaaatcacctcta

SEQ ID NO: 2975 - RNA, 20 nt, synthetic construct
  misc_feature 1..20: note = source = /note="Description of Artificial Sequence: Synthetic oligonucleotide"
  source 1..20: mol_type = other RNA
aaaacatacaaatcacctct

SEQ ID NO: 2976 - RNA, 20 nt, synthetic construct
  misc_feature 1..20: note = source = /note="Description of Artificial Sequence: Synthetic oligonucleotide"
  source 1..20: mol_type = other RNA
tcgattaaaacatacaaatc

SEQ ID NO: 2977 - RNA, 20 nt, synthetic construct
  misc_feature 1..20: note = source = /note="Description of Artificial Sequence: Synthetic oligonucleotide"
  source 1..20: mol_type = other RNA
aggtcttatcgactctgatg

SEQ ID NO: 2978 - RNA, 20 nt, synthetic construct
  misc_feature 1..20: note = source = /note="Description of Artificial Sequence: Synthetic oligonucleotide"
  source 1..20: mol_type = other RNA
cgtcggagacggagggccct

SEQ ID NO: 2979 - RNA, 20 nt, synthetic construct
  misc_feature 1..20: note = source = /note="Description of Artificial Sequence: Synthetic oligonucleotide"
  source 1..20: mol_type = other RNA
gcgtcggagacggagggccc

SEQ ID NO: 2980 - RNA, 20 nt, synthetic construct
  misc_feature 1..20: note = source = /note="Description of Artificial Sequence: Synthetic oligonucleotide"
  source 1..20: mol_type = other RNA
gtggcgtcggagacggaggg

SEQ ID NO: 2981 - RNA, 20 nt, synthetic construct
  misc_feature 1..20: note = source = /note="Description of Artificial Sequence: Synthetic oligonucleotide"
  source 1..20: mol_type = other RNA
agtggcgtcggagacggagg

SEQ ID NO: 2982 - RNA, 20 nt, synthetic construct
  misc_feature 1..20: note = source = /note="Description of Artificial Sequence: Synthetic oligonucleotide"
  source 1..20: mol_type = other RNA
cctcacgtcgtctcggtaga

SEQ ID NO: 2983 - RNA, 20 nt, synthetic construct
  misc_feature 1..20: note = source = /note="Description of Artificial Sequence: Synthetic oligonucleotide"
  source 1..20: mol_type = other RNA
agagagacggagcgggtccg

SEQ ID NO: 2984 - RNA, 20 nt, synthetic construct
  misc_feature 1..20: note = source = /note="Description of Artificial Sequence: Synthetic oligonucleotide"
  source 1..20: mol_type = other RNA
tctcagagagacggagcggg

SEQ ID NO: 2985 - RNA, 20 nt, synthetic construct
  misc_feature 1..20: note = source = /note="Description of Artificial Sequence: Synthetic oligonucleotide"
  source 1..20: mol_type = other RNA
ttattaaaaaagaaaaaaac

SEQ ID NO: 2986 - RNA, 20 nt, synthetic construct
  misc_feature 1..20: note = source = /note="Description of Artificial Sequence: Synthetic oligonucleotide"
  source 1..20: mol_type = other RNA
gtcaacagtaggttctatta

SEQ ID NO: 2987 - RNA, 20 nt, synthetic construct
  misc_feature 1..20: note = source = /note="Description of Artificial Sequence: Synthetic oligonucleotide"
  source 1..20: mol_type = other RNA
ggtcaacagtaggttctatt

SEQ ID NO: 2988 - RNA, 20 nt, synthetic construct
  misc_feature 1..20: note = source = /note="Description of Artificial Sequence: Synthetic oligonucleotide"
  source 1..20: mol_type = other RNA
ttgactgagaggtcaacagt

SEQ ID NO: 2989 - RNA, 20 nt, synthetic construct
  misc_feature 1..20: note = source = /note="Description of Artificial Sequence: Synthetic oligonucleotide"
  source 1..20: mol_type = other RNA
tccattaaatattgactgag

SEQ ID NO: 2990 - RNA, 20 nt, synthetic construct
  misc_feature 1..20: note = source = /note="Description of Artificial Sequence: Synthetic oligonucleotide"
  source 1..20: mol_type = other RNA
ttttttctagttaaattgca

SEQ ID NO: 2991 - RNA, 20 nt, synthetic construct
  misc_feature 1..20: note = source = /note="Description of Artificial Sequence: Synthetic oligonucleotide"
  source 1..20: mol_type = other RNA
tttctttctttgaaagaaaa

SEQ ID NO: 2992 - RNA, 20 nt, synthetic construct
  misc_feature 1..20: note = source = /note="Description of Artificial Sequence: Synthetic oligonucleotide"
  source 1..20: mol_type = other RNA
tgtggtgacgtgaggtcgga

SEQ ID NO: 2993 - RNA, 20 nt, synthetic construct
  misc_feature 1..20: note = source = /note="Description of Artificial Sequence: Synthetic oligonucleotide"
  source 1..20: mol_type = other RNA
gtgaacttggaccttccgtc

SEQ ID NO: 2994 - RNA, 20 nt, synthetic construct
  misc_feature 1..20: note = source = /note="Description of Artificial Sequence: Synthetic oligonucleotide"
  source 1..20: mol_type = other RNA
ctcttagtgaacttggacct

SEQ ID NO: 2995 - RNA, 20 nt, synthetic construct
  misc_feature 1..20: note = source = /note="Description of Artificial Sequence: Synthetic oligonucleotide"
  source 1..20: mol_type = other RNA
ctttctcttagtgaacttgg

SEQ ID NO: 2996 - RNA, 20 nt, synthetic construct
  misc_feature 1..20: note = source = /note="Description of Artificial Sequence: Synthetic oligonucleotide"
  source 1..20: mol_type = other RNA
ggatcagggtcgatgagacc

SEQ ID NO: 2997 - RNA, 20 nt, synthetic construct
  misc_feature 1..20: note = source = /note="Description of Artificial Sequence: Synthetic oligonucleotide"
  source 1..20: mol_type = other RNA
aggatcagggtcgatgagac

SEQ ID NO: 2998 - RNA, 20 nt, synthetic construct
  misc_feature 1..20: note = source = /note="Description of Artificial Sequence: Synthetic oligonucleotide"
  source 1..20: mol_type = other RNA
gaggatcagggtcgatgaga

SEQ ID NO: 2999 - RNA, 20 nt, synthetic construct
  misc_feature 1..20: note = source = /note="Description of Artificial Sequence: Synthetic oligonucleotide"
  source 1..20: mol_type = other RNA
cgaggatcagggtcgatgag

SEQ ID NO: 3000 - RNA, 20 nt, synthetic construct
  misc_feature 1..20: note = source = /note="Description of Artificial Sequence: Synthetic oligonucleotide"
  source 1..20: mol_type = other RNA
ttttaatcggtccacaccac

SEQ ID NO: 3001 - RNA, 20 nt, synthetic construct
  misc_feature 1..20: note = source = /note="Description of Artificial Sequence: Synthetic oligonucleotide"
  source 1..20: mol_type = other RNA
tttttaatcggtccacacca

SEQ ID NO: 3002 - RNA, 20 nt, synthetic construct
  misc_feature 1..20: note = source = /note="Description of Artificial Sequence: Synthetic oligonucleotide"
  source 1..20: mol_type = other RNA
ctttttaatcggtccacacc

SEQ ID NO: 3003 - RNA, 20 nt, synthetic construct
  misc_feature 1..20: note = source = /note="Description of Artificial Sequence: Synthetic oligonucleotide"
  source 1..20: mol_type = other RNA
tatctttttaatcggtccac

SEQ ID NO: 3004 - RNA, 20 nt, synthetic construct
  misc_feature 1..20: note = source = /note="Description of Artificial Sequence: Synthetic oligonucleotide"
  source 1..20: mol_type = other RNA
atttttatctttttaatcgg

SEQ ID NO: 3005 - RNA, 20 nt, synthetic construct
  misc_feature 1..20: note = source = /note="Description of Artificial Sequence: Synthetic oligonucleotide"
  source 1..20: mol_type = other RNA
gctctagtcggaccggttgt

SEQ ID NO: 3006 - RNA, 20 nt, synthetic construct
  misc_feature 1..20: note = source = /note="Description of Artificial Sequence: Synthetic oligonucleotide"
  source 1..20: mol_type = other RNA
ggtcctcatgctctagtcgg

SEQ ID NO: 3007 - RNA, 20 nt, synthetic construct
  misc_feature 1..20: note = source = /note="Description of Artificial Sequence: Synthetic oligonucleotide"
  source 1..20: mol_type = other RNA
gtccgtctagtggactctgg

SEQ ID NO: 3008 - RNA, 20 nt, synthetic construct
  misc_feature 1..20: note = source = /note="Description of Artificial Sequence: Synthetic oligonucleotide"
  source 1..20: mol_type = other RNA
cgtgaaaccctctgggcccg

SEQ ID NO: 3009 - RNA, 20 nt, synthetic construct
  misc_feature 1..20: note = source = /note="Description of Artificial Sequence: Synthetic oligonucleotide"
  source 1..20: mol_type = other RNA
gggtcgtgaaaccctctggg

SEQ ID NO: 3010 - RNA, 20 nt, synthetic construct
  misc_feature 1..20: note = source = /note="Description of Artificial Sequence: Synthetic oligonucleotide"
  source 1..20: mol_type = other RNA
agggtcgtgaaaccctctgg

SEQ ID NO: 3011 - RNA, 20 nt, synthetic construct
  misc_feature 1..20: note = source = /note="Description of Artificial Sequence: Synthetic oligonucleotide"
  source 1..20: mol_type = other RNA
cggacattagggtcgtgaaa

SEQ ID NO: 3012 - RNA, 20 nt, synthetic construct
  misc_feature 1..20: note = source = /note="Description of Artificial Sequence: Synthetic oligonucleotide"
  source 1..20: mol_type = other RNA
acggacattagggtcgtgaa

SEQ ID NO: 3013 - RNA, 20 nt, synthetic construct
  misc_feature 1..20: note = source = /note="Description of Artificial Sequence: Synthetic oligonucleotide"
  source 1..20: mol_type = other RNA
atagattactggtccacgtc

SEQ ID NO: 3014 - RNA, 20 nt, synthetic construct
  misc_feature 1..20: note = source = /note="Description of Artificial Sequence: Synthetic oligonucleotide"
  source 1..20: mol_type = other RNA
cattgaaaatagattactgg

SEQ ID NO: 3015 - RNA, 20 nt, synthetic construct
  misc_feature 1..20: note = source = /note="Description of Artificial Sequence: Synthetic oligonucleotide"
  source 1..20: mol_type = other RNA
gcctgtagaaattaaatgta

SEQ ID NO: 3016 - RNA, 20 nt, synthetic construct
  misc_feature 1..20: note = source = /note="Description of Artificial Sequence: Synthetic oligonucleotide"
  source 1..20: mol_type = other RNA
taaaatgggtggcttttata

SEQ ID NO: 3017 - RNA, 20 nt, synthetic construct
  misc_feature 1..20: note = source = /note="Description of Artificial Sequence: Synthetic oligonucleotide"
  source 1..20: mol_type = other RNA
ttaaaatgggtggcttttat

SEQ ID NO: 3018 - RNA, 20 nt, synthetic construct
  misc_feature 1..20: note = source = /note="Description of Artificial Sequence: Synthetic oligonucleotide"
  source 1..20: mol_type = other RNA
acttttgtgcttaaaatggg

SEQ ID NO: 3019 - RNA, 20 nt, synthetic construct
  misc_feature 1..20: note = source = /note="Description of Artificial Sequence: Synthetic oligonucleotide"
  source 1..20: mol_type = other RNA
ttcacttttgtgcttaaaat

SEQ ID NO: 3020 - RNA, 20 nt, synthetic construct
  misc_feature 1..20: note = source = /note="Description of Artificial Sequence: Synthetic oligonucleotide"
  source 1..20: mol_type = other RNA
attcacttttgtgcttaaaa

SEQ ID NO: 3021 - RNA, 20 nt, synthetic construct
  misc_feature 1..20: note = source = /note="Description of Artificial Sequence: Synthetic oligonucleotide"
  source 1..20: mol_type = other RNA
gagacataataaagtatgtt

SEQ ID NO: 3022 - RNA, 20 nt, synthetic construct
  misc_feature 1..20: note = source = /note="Description of Artificial Sequence: Synthetic oligonucleotide"
  source 1..20: mol_type = other RNA
cctttaactcgttcatatgc

SEQ ID NO: 3023 - RNA, 20 nt, synthetic construct
  misc_feature 1..20: note = source = /note="Description of Artificial Sequence: Synthetic oligonucleotide"
  source 1..20: mol_type = other RNA
aacgtttcacaacggtgacc

SEQ ID NO: 3024 - RNA, 20 nt, synthetic construct
  misc_feature 1..20: note = source = /note="Description of Artificial Sequence: Synthetic oligonucleotide"
  source 1..20: mol_type = other RNA
aaacgtttcacaacggtgac

SEQ ID NO: 3025 - RNA, 20 nt, synthetic construct
  misc_feature 1..20: note = source = /note="Description of Artificial Sequence: Synthetic oligonucleotide"
  source 1..20: mol_type = other RNA
aaaacgtttcacaacggtga

SEQ ID NO: 3026 - RNA, 20 nt, synthetic construct
  misc_feature 1..20: note = source = /note="Description of Artificial Sequence: Synthetic oligonucleotide"
  source 1..20: mol_type = other RNA
caaaacgtttcacaacggtg

SEQ ID NO: 3027 - RNA, 20 nt, synthetic construct
  misc_feature 1..20: note = source = /note="Description of Artificial Sequence: Synthetic oligonucleotide"
  source 1..20: mol_type = other RNA
ggtgtagttacagtcatagt

SEQ ID NO: 3028 - RNA, 20 nt, synthetic construct
  misc_feature 1..20: note = source = /note="Description of Artificial Sequence: Synthetic oligonucleotide"
  source 1..20: mol_type = other RNA
ctgtagacttattctaatca

SEQ ID NO: 3029 - RNA, 20 nt, synthetic construct
  misc_feature 1..20: note = source = /note="Description of Artificial Sequence: Synthetic oligonucleotide"
  source 1..20: mol_type = other RNA
ttactcatgttcaatttgac

SEQ ID NO: 3030 - RNA, 20 nt, synthetic construct
  misc_feature 1..20: note = source = /note="Description of Artificial Sequence: Synthetic oligonucleotide"
  source 1..20: mol_type = other RNA
tatgtgatgtacactgattt

SEQ ID NO: 3031 - RNA, 20 nt, synthetic construct
  misc_feature 1..20: note = source = /note="Description of Artificial Sequence: Synthetic oligonucleotide"
  source 1..20: mol_type = other RNA
ttctctgttttgagaaaaaa

SEQ ID NO: 3032 - RNA, 20 nt, synthetic construct
  misc_feature 1..20: note = source = /note="Description of Artificial Sequence: Synthetic oligonucleotide"
  source 1..20: mol_type = other RNA
ttctgacacacattttaata

SEQ ID NO: 3033 - RNA, 20 nt, synthetic construct
  misc_feature 1..20: note = source = /note="Description of Artificial Sequence: Synthetic oligonucleotide"
  source 1..20: mol_type = other RNA
aaggccattctatcaaaaaa

SEQ ID NO: 3034 - RNA, 20 nt, synthetic construct
  misc_feature 1..20: note = source = /note="Description of Artificial Sequence: Synthetic oligonucleotide"
  source 1..20: mol_type = other RNA
ttaaaatatttttaacataa

SEQ ID NO: 3035 - RNA, 20 nt, synthetic construct
  misc_feature 1..20: note = source = /note="Description of Artificial Sequence: Synthetic oligonucleotide"
  source 1..20: mol_type = other RNA
ttcttattatggatagagat

SEQ ID NO: 3036 - RNA, 20 nt, synthetic construct
  misc_feature 1..20: note = source = /note="Description of Artificial Sequence: Synthetic oligonucleotide"
  source 1..20: mol_type = other RNA
attcttattatggatagaga

SEQ ID NO: 3037 - RNA, 20 nt, synthetic construct
  misc_feature 1..20: note = source = /note="Description of Artificial Sequence: Synthetic oligonucleotide"
  source 1..20: mol_type = other RNA
tcaaaggagtgagtatttat

SEQ ID NO: 3038 - RNA, 20 nt, synthetic construct
  misc_feature 1..20: note = source = /note="Description of Artificial Sequence: Synthetic oligonucleotide"
  source 1..20: mol_type = other RNA
gtcaaaggagtgagtattta

SEQ ID NO: 3039 - RNA, 20 nt, synthetic construct
  misc_feature 1..20: note = source = /note="Description of Artificial Sequence: Synthetic oligonucleotide"
  source 1..20: mol_type = other RNA
ccttcaataaattggagtga

SEQ ID NO: 3040 - RNA, 20 nt, synthetic construct
  misc_feature 1..20: note = source = /note="Description of Artificial Sequence: Synthetic oligonucleotide"
  source 1..20: mol_type = other RNA
tccttcaataaattggagtg

SEQ ID NO: 3041 - RNA, 20 nt, synthetic construct
  misc_feature 1..20: note = source = /note="Description of Artificial Sequence: Synthetic oligonucleotide"
  source 1..20: mol_type = other RNA
catatccgacatacttgaat

SEQ ID NO: 3042 - RNA, 20 nt, synthetic construct
  misc_feature 1..20: note = source = /note="Description of Artificial Sequence: Synthetic oligonucleotide"
  source 1..20: mol_type = other RNA
cgattcggattcggtacata

SEQ ID NO: 3043 - RNA, 20 nt, synthetic construct
  misc_feature 1..20: note = source = /note="Description of Artificial Sequence: Synthetic oligonucleotide"
  source 1..20: mol_type = other RNA
tctgacgaattgagtttacg

SEQ ID NO: 3044 - RNA, 20 nt, synthetic construct
  misc_feature 1..20: note = source = /note="Description of Artificial Sequence: Synthetic oligonucleotide"
  source 1..20: mol_type = other RNA
ttatatcactaattttctaa

SEQ ID NO: 3045 - RNA, 20 nt, synthetic construct
  misc_feature 1..20: note = source = /note="Description of Artificial Sequence: Synthetic oligonucleotide"
  source 1..20: mol_type = other RNA
tattacgacattacttgtaa

SEQ ID NO: 3046 - RNA, 20 nt, synthetic construct
  misc_feature 1..20: note = source = /note="Description of Artificial Sequence: Synthetic oligonucleotide"
  source 1..20: mol_type = other RNA
agtactgtactatctgtaga

SEQ ID NO: 3047 - RNA, 20 nt, synthetic construct
  misc_feature 1..20: note = source = /note="Description of Artificial Sequence: Synthetic oligonucleotide"
  source 1..20: mol_type = other RNA
gagtactgtactatctgtag

SEQ ID NO: 3048 - RNA, 20 nt, synthetic construct
  misc_feature 1..20: note = source = /note="Description of Artificial Sequence: Synthetic oligonucleotide"
  source 1..20: mol_type = other RNA
gaattattataaagtgacat

SEQ ID NO: 3049 - RNA, 20 nt, synthetic construct
  misc_feature 1..20: note = source = /note="Description of Artificial Sequence: Synthetic oligonucleotide"
  source 1..20: mol_type = other RNA
ttaactttcgtatagtatac

SEQ ID NO: 3050 - RNA, 20 nt, synthetic construct
  misc_feature 1..20: note = source = /note="Description of Artificial Sequence: Synthetic oligonucleotide"
  source 1..20: mol_type = other RNA
gaggaatctaaacggataag

SEQ ID NO: 3051 - RNA, 20 nt, synthetic construct
  misc_feature 1..20: note = source = /note="Description of Artificial Sequence: Synthetic oligonucleotide"
  source 1..20: mol_type = other RNA
tttctttagagtatgaataa

SEQ ID NO: 3052 - RNA, 20 nt, synthetic construct
  misc_feature 1..20: note = source = /note="Description of Artificial Sequence: Synthetic oligonucleotide"
  source 1..20: mol_type = other RNA
aagtcgtataagtttctcaa

SEQ ID NO: 3053 - RNA, 20 nt, synthetic construct
  misc_feature 1..20: note = source = /note="Description of Artificial Sequence: Synthetic oligonucleotide"
  source 1..20: mol_type = other RNA
aaagtcgtataagtttctca

SEQ ID NO: 3054 - RNA, 20 nt, synthetic construct
  misc_feature 1..20: note = source = /note="Description of Artificial Sequence: Synthetic oligonucleotide"
  source 1..20: mol_type = other RNA
aaatttcgtatattaagtca

SEQ ID NO: 3055 - RNA, 20 nt, synthetic construct
  misc_feature 1..20: note = source = /note="Description of Artificial Sequence: Synthetic oligonucleotide"
  source 1..20: mol_type = other RNA
aaaatttcgtatattaagtc

SEQ ID NO: 3056 - RNA, 20 nt, synthetic construct
  misc_feature 1..20: note = source = /note="Description of Artificial Sequence: Synthetic oligonucleotide"
  source 1..20: mol_type = other RNA
agggtttcacggtcctaatg

SEQ ID NO: 3057 - RNA, 20 nt, synthetic construct
  misc_feature 1..20: note = source = /note="Description of Artificial Sequence: Synthetic oligonucleotide"
  source 1..20: mol_type = other RNA
ggaaccggagggtttcacgg

SEQ ID NO: 3058 - RNA, 20 nt, synthetic construct
  misc_feature 1..20: note = source = /note="Description of Artificial Sequence: Synthetic oligonucleotide"
  source 1..20: mol_type = other RNA
tttgaagaccagagggcgga

SEQ ID NO: 3059 - RNA, 20 nt, synthetic construct
  misc_feature 1..20: note = source = /note="Description of Artificial Sequence: Synthetic oligonucleotide"
  source 1..20: mol_type = other RNA
ggtctgattagagtttgaag

SEQ ID NO: 3060 - RNA, 20 nt, synthetic construct
  misc_feature 1..20: note = source = /note="Description of Artificial Sequence: Synthetic oligonucleotide"
  source 1..20: mol_type = other RNA
gtatccttctcatctataag

SEQ ID NO: 3061 - RNA, 20 nt, synthetic construct
  misc_feature 1..20: note = source = /note="Description of Artificial Sequence: Synthetic oligonucleotide"
  source 1..20: mol_type = other RNA
tcttcccatatgagctctaa

SEQ ID NO: 3062 - RNA, 20 nt, synthetic construct
  misc_feature 1..20: note = source = /note="Description of Artificial Sequence: Synthetic oligonucleotide"
  source 1..20: mol_type = other RNA
atctcctgaactgaatggct

SEQ ID NO: 3063 - RNA, 20 nt, synthetic construct
  misc_feature 1..20: note = source = /note="Description of Artificial Sequence: Synthetic oligonucleotide"
  source 1..20: mol_type = other RNA
gttacatctcctgaactgaa

SEQ ID NO: 3064 - RNA, 20 nt, synthetic construct
  misc_feature 1..20: note = source = /note="Description of Artificial Sequence: Synthetic oligonucleotide"
  source 1..20: mol_type = other RNA
agacattccttttaacactt

SEQ ID NO: 3065 - RNA, 20 nt, synthetic construct
  misc_feature 1..20: note = source = /note="Description of Artificial Sequence: Synthetic oligonucleotide"
  source 1..20: mol_type = other RNA
cagacattccttttaacact

SEQ ID NO: 3066 - RNA, 20 nt, synthetic construct
  misc_feature 1..20: note = source = /note="Description of Artificial Sequence: Synthetic oligonucleotide"
  source 1..20: mol_type = other RNA
agcgtttcacgaccctaatg

SEQ ID NO: 3067 - RNA, 20 nt, synthetic construct
  misc_feature 1..20: note = source = /note="Description of Artificial Sequence: Synthetic oligonucleotide"
  source 1..20: mol_type = other RNA
gaaggcggagcgtttcacga

SEQ ID NO: 3068 - RNA, 20 nt, synthetic construct
  misc_feature 1..20: note = source = /note="Description of Artificial Sequence: Synthetic oligonucleotide"
  source 1..20: mol_type = other RNA
tgaaggcggagcgtttcacg

SEQ ID NO: 3069 - RNA, 20 nt, synthetic construct
  misc_feature 1..20: note = source = /note="Description of Artificial Sequence: Synthetic oligonucleotide"
  source 1..20: mol_type = other RNA
ccccaaaacggtacaacggg

SEQ ID NO: 3070 - RNA, 20 nt, synthetic construct
  misc_feature 1..20: note = source = /note="Description of Artificial Sequence: Synthetic oligonucleotide"
  source 1..20: mol_type = other RNA
cacgtaaaaaacatccctac

SEQ ID NO: 3071 - RNA, 20 nt, synthetic construct
  misc_feature 1..20: note = source = /note="Description of Artificial Sequence: Synthetic oligonucleotide"
  source 1..20: mol_type = other RNA
acacgtaaaaaacatcccta

SEQ ID NO: 3072 - RNA, 20 nt, synthetic construct
  misc_feature 1..20: note = source = /note="Description of Artificial Sequence: Synthetic oligonucleotide"
  source 1..20: mol_type = other RNA
aacacgtaaaaaacatccct

SEQ ID NO: 3073 - RNA, 20 nt, synthetic construct
  misc_feature 1..20: note = source = /note="Description of Artificial Sequence: Synthetic oligonucleotide"
  source 1..20: mol_type = other RNA
attaaacacgtaaaaaacat

SEQ ID NO: 3074 - RNA, 20 nt, synthetic construct
  misc_feature 1..20: note = source = /note="Description of Artificial Sequence: Synthetic oligonucleotide"
  source 1..20: mol_type = other RNA
gattaaacacgtaaaaaaca

SEQ ID NO: 3075 - RNA, 20 nt, synthetic construct
  misc_feature 1..20: note = source = /note="Description of Artificial Sequence: Synthetic oligonucleotide"
  source 1..20: mol_type = other RNA
gtgttcatggaccttgatgt

SEQ ID NO: 3076 - RNA, 20 nt, synthetic construct
  misc_feature 1..20: note = source = /note="Description of Artificial Sequence: Synthetic oligonucleotide"
  source 1..20: mol_type = other RNA
ggtgttcatggaccttgatg

SEQ ID NO: 3077 - RNA, 20 nt, synthetic construct
  misc_feature 1..20: note = source = /note="Description of Artificial Sequence: Synthetic oligonucleotide"
  source 1..20: mol_type = other RNA
cggagtcggggtgttcatgg

SEQ ID NO: 3078 - RNA, 20 nt, synthetic construct
  misc_feature 1..20: note = source = /note="Description of Artificial Sequence: Synthetic oligonucleotide"
  source 1..20: mol_type = other RNA
gtgacgtcggagttgaaggg

SEQ ID NO: 3079 - RNA, 20 nt, synthetic construct
  misc_feature 1..20: note = source = /note="Description of Artificial Sequence: Synthetic oligonucleotide"
  source 1..20: mol_type = other RNA
cttcacacccccgtggttgt

SEQ ID NO: 3080 - RNA, 20 nt, synthetic construct
  misc_feature 1..20: note = source = /note="Description of Artificial Sequence: Synthetic oligonucleotide"
  source 1..20: mol_type = other RNA
agtgggtccgacttcacacc

SEQ ID NO: 3081 - RNA, 20 nt, synthetic construct
  misc_feature 1..20: note = source = /note="Description of Artificial Sequence: Synthetic oligonucleotide"
  source 1..20: mol_type = other RNA
cagtgggtccgacttcacac

SEQ ID NO: 3082 - RNA, 20 nt, synthetic construct
  misc_feature 1..20: note = source = /note="Description of Artificial Sequence: Synthetic oligonucleotide"
  source 1..20: mol_type = other RNA
acagtgggtccgacttcaca

SEQ ID NO: 3083 - RNA, 20 nt, synthetic construct
  misc_feature 1..20: note = source = /note="Description of Artificial Sequence: Synthetic oligonucleotide"
  source 1..20: mol_type = other RNA
aacagtgggtccgacttcac

SEQ ID NO: 3084 - RNA, 20 nt, synthetic construct
  misc_feature 1..20: note = source = /note="Description of Artificial Sequence: Synthetic oligonucleotide"
  source 1..20: mol_type = other RNA
tcccagagtaaaacagtggg

SEQ ID NO: 3085 - RNA, 20 nt, synthetic construct
  misc_feature 1..20: note = source = /note="Description of Artificial Sequence: Synthetic oligonucleotide"
  source 1..20: mol_type = other RNA
tagaaaaaaaaactctctct

SEQ ID NO: 3086 - RNA, 20 nt, synthetic construct
  misc_feature 1..20: note = source = /note="Description of Artificial Sequence: Synthetic oligonucleotide"
  source 1..20: mol_type = other RNA
atagaaaaaaaaactctctc

SEQ ID NO: 3087 - RNA, 20 nt, synthetic construct
  misc_feature 1..20: note = source = /note="Description of Artificial Sequence: Synthetic oligonucleotide"
  source 1..20: mol_type = other RNA
aaaatctgaaacatgacaag

SEQ ID NO: 3088 - RNA, 20 nt, synthetic construct
  misc_feature 1..20: note = source = /note="Description of Artificial Sequence: Synthetic oligonucleotide"
  source 1..20: mol_type = other RNA
atgccacagtatcagttaac

SEQ ID NO: 3089 - RNA, 20 nt, synthetic construct
  misc_feature 1..20: note = source = /note="Description of Artificial Sequence: Synthetic oligonucleotide"
  source 1..20: mol_type = other RNA
ccctgtttctcactttgtcc

SEQ ID NO: 3090 - RNA, 20 nt, synthetic construct
  misc_feature 1..20: note = source = /note="Description of Artificial Sequence: Synthetic oligonucleotide"
  source 1..20: mol_type = other RNA
gcagccatgtgtagcaaaga

SEQ ID NO: 3091 - RNA, 20 nt, synthetic construct
  misc_feature 1..20: note = source = /note="Description of Artificial Sequence: Synthetic oligonucleotide"
  source 1..20: mol_type = other RNA
gtggtttgtagaagttctgc

SEQ ID NO: 3092 - RNA, 20 nt, synthetic construct
  misc_feature 1..20: note = source = /note="Description of Artificial Sequence: Synthetic oligonucleotide"
  source 1..20: mol_type = other RNA
gcactcattttacctgtaag

SEQ ID NO: 3093 - RNA, 20 nt, synthetic construct
  misc_feature 1..20: note = source = /note="Description of Artificial Sequence: Synthetic oligonucleotide"
  source 1..20: mol_type = other RNA
ctacaagtcatagttccata

SEQ ID NO: 3094 - RNA, 20 nt, synthetic construct
  misc_feature 1..20: note = source = /note="Description of Artificial Sequence: Synthetic oligonucleotide"
  source 1..20: mol_type = other RNA
actacaagtcatagttccat

SEQ ID NO: 3095 - RNA, 20 nt, synthetic construct
  misc_feature 1..20: note = source = /note="Description of Artificial Sequence: Synthetic oligonucleotide"
  source 1..20: mol_type = other RNA
ctggtatctagaattacata

SEQ ID NO: 3096 - RNA, 20 nt, synthetic construct
  misc_feature 1..20: note = source = /note="Description of Artificial Sequence: Synthetic oligonucleotide"
  source 1..20: mol_type = other RNA
cattgcacaacaagaatgtc

SEQ ID NO: 3097 - RNA, 20 nt, synthetic construct
  misc_feature 1..20: note = source = /note="Description of Artificial Sequence: Synthetic oligonucleotide"
  source 1..20: mol_type = other RNA
cattctcatgagaataaaaa

SEQ ID NO: 3098 - RNA, 20 nt, synthetic construct
  misc_feature 1..20: note = source = /note="Description of Artificial Sequence: Synthetic oligonucleotide"
  source 1..20: mol_type = other RNA
gcattctcatgagaataaaa

SEQ ID NO: 3099 - RNA, 20 nt, synthetic construct
  misc_feature 1..20: note = source = /note="Description of Artificial Sequence: Synthetic oligonucleotide"
  source 1..20: mol_type = other RNA
cccaaggtatgggatccaac

SEQ ID NO: 3100 - RNA, 20 nt, synthetic construct
  misc_feature 1..20: note = source = /note="Description of Artificial Sequence: Synthetic oligonucleotide"
  source 1..20: mol_type = other RNA
cagtcatggtcccaaggtat

SEQ ID NO: 3101 - RNA, 20 nt, synthetic construct
  misc_feature 1..20: note = source = /note="Description of Artificial Sequence: Synthetic oligonucleotide"
  source 1..20: mol_type = other RNA
tcagtcatggtcccaaggta

SEQ ID NO: 3102 - RNA, 20 nt, synthetic construct
  misc_feature 1..20: note = source = /note="Description of Artificial Sequence: Synthetic oligonucleotide"
  source 1..20: mol_type = other RNA
agttatcagtcatggtccca

SEQ ID NO: 3103 - RNA, 20 nt, synthetic construct
  misc_feature 1..20: note = source = /note="Description of Artificial Sequence: Synthetic oligonucleotide"
  source 1..20: mol_type = other RNA
tccactccagttatcagtca

SEQ ID NO: 3104 - RNA, 20 nt, synthetic construct
  misc_feature 1..20: note = source = /note="Description of Artificial Sequence: Synthetic oligonucleotide"
  source 1..20: mol_type = other RNA
agccaatatacttccttatt

SEQ ID NO: 3105 - RNA, 20 nt, synthetic construct
  misc_feature 1..20: note = source = /note="Description of Artificial Sequence: Synthetic oligonucleotide"
  source 1..20: mol_type = other RNA
aagccaatatacttccttat

SEQ ID NO: 3106 - RNA, 20 nt, synthetic construct
  misc_feature 1..20: note = source = /note="Description of Artificial Sequence: Synthetic oligonucleotide"
  source 1..20: mol_type = other RNA
ctaacatgagcatctatctt

SEQ ID NO: 3107 - RNA, 20 nt, synthetic construct
  misc_feature 1..20: note = source = /note="Description of Artificial Sequence: Synthetic oligonucleotide"
  source 1..20: mol_type = other RNA
tctaacatgagcatctatct

SEQ ID NO: 3108 - RNA, 20 nt, synthetic construct
  misc_feature 1..20: note = source = /note="Description of Artificial Sequence: Synthetic oligonucleotide"
  source 1..20: mol_type = other RNA
cactacaccaacttcttaat

SEQ ID NO: 3109 - RNA, 20 nt, synthetic construct
  misc_feature 1..20: note = source = /note="Description of Artificial Sequence: Synthetic oligonucleotide"
  source 1..20: mol_type = other RNA
tcactacaccaacttcttaa

SEQ ID NO: 3110 - RNA, 20 nt, synthetic construct
  misc_feature 1..20: note = source = /note="Description of Artificial Sequence: Synthetic oligonucleotide"
  source 1..20: mol_type = other RNA
agctagtcatttctccagta

SEQ ID NO: 3111 - RNA, 20 nt, synthetic construct
  misc_feature 1..20: note = source = /note="Description of Artificial Sequence: Synthetic oligonucleotide"
  source 1..20: mol_type = other RNA
aaatttatagtcagctgagg

SEQ ID NO: 3112 - RNA, 20 nt, synthetic construct
  misc_feature 1..20: note = source = /note="Description of Artificial Sequence: Synthetic oligonucleotide"
  source 1..20: mol_type = other RNA
caaaaatttatagtcagctg

SEQ ID NO: 3113 - RNA, 20 nt, synthetic construct
  misc_feature 1..20: note = source = /note="Description of Artificial Sequence: Synthetic oligonucleotide"
  source 1..20: mol_type = other RNA
gaacaacttttttaaaatta

SEQ ID NO: 3114 - RNA, 20 nt, synthetic construct
  misc_feature 1..20: note = source = /note="Description of Artificial Sequence: Synthetic oligonucleotide"
  source 1..20: mol_type = other RNA
gagaacagatttacattttt

SEQ ID NO: 3115 - RNA, 20 nt, synthetic construct
  misc_feature 1..20: note = source = /note="Description of Artificial Sequence: Synthetic oligonucleotide"
  source 1..20: mol_type = other RNA
catttttcttcttttgaata

SEQ ID NO: 3116 - RNA, 20 nt, synthetic construct
  misc_feature 1..20: note = source = /note="Description of Artificial Sequence: Synthetic oligonucleotide"
  source 1..20: mol_type = other RNA
gcatttctatgcctgaacat

SEQ ID NO: 3117 - RNA, 20 nt, synthetic construct
  misc_feature 1..20: note = source = /note="Description of Artificial Sequence: Synthetic oligonucleotide"
  source 1..20: mol_type = other RNA
aaaaatatcaatactctgta

SEQ ID NO: 3118 - RNA, 20 nt, synthetic construct
  misc_feature 1..20: note = source = /note="Description of Artificial Sequence: Synthetic oligonucleotide"
  source 1..20: mol_type = other RNA
ggttttagcaatggctaatg

SEQ ID NO: 3119 - RNA, 20 nt, synthetic construct
  misc_feature 1..20: note = source = /note="Description of Artificial Sequence: Synthetic oligonucleotide"
  source 1..20: mol_type = other RNA
ggtaaggcaggttttagcaa

SEQ ID NO: 3120 - RNA, 20 nt, synthetic construct
  misc_feature 1..20: note = source = /note="Description of Artificial Sequence: Synthetic oligonucleotide"
  source 1..20: mol_type = other RNA
aataagtgatttggtaaggc

SEQ ID NO: 3121 - RNA, 20 nt, synthetic construct
  misc_feature 1..20: note = source = /note="Description of Artificial Sequence: Synthetic oligonucleotide"
  source 1..20: mol_type = other RNA
agaaaataagtgatttggta

SEQ ID NO: 3122 - RNA, 20 nt, synthetic construct
  misc_feature 1..20: note = source = /note="Description of Artificial Sequence: Synthetic oligonucleotide"
  source 1..20: mol_type = other RNA
catcaagaaaataagtgatt

SEQ ID NO: 3123 - RNA, 20 nt, synthetic construct
  misc_feature 1..20: note = source = /note="Description of Artificial Sequence: Synthetic oligonucleotide"
  source 1..20: mol_type = other RNA
gttctcattaatgtataacc

SEQ ID NO: 3124 - RNA, 20 nt, synthetic construct
  misc_feature 1..20: note = source = /note="Description of Artificial Sequence: Synthetic oligonucleotide"
  source 1..20: mol_type = other RNA
taataacccatttgagagat

SEQ ID NO: 3125 - RNA, 20 nt, synthetic construct
  misc_feature 1..20: note = source = /note="Description of Artificial Sequence: Synthetic oligonucleotide"
  source 1..20: mol_type = other RNA
ataataacccatttgagaga

SEQ ID NO: 3126 - RNA, 20 nt, synthetic construct
  misc_feature 1..20: note = source = /note="Description of Artificial Sequence: Synthetic oligonucleotide"
  source 1..20: mol_type = other RNA
ttttatgcatcatctatttc

SEQ ID NO: 3127 - RNA, 20 nt, synthetic construct
  misc_feature 1..20: note = source = /note="Description of Artificial Sequence: Synthetic oligonucleotide"
  source 1..20: mol_type = other RNA
atataccatgctatgttatc

SEQ ID NO: 3128 - RNA, 20 nt, synthetic construct
  misc_feature 1..20: note = source = /note="Description of Artificial Sequence: Synthetic oligonucleotide"
  source 1..20: mol_type = other RNA
agacaggtaagaaaaacggg

SEQ ID NO: 3129 - RNA, 20 nt, synthetic construct
  misc_feature 1..20: note = source = /note="Description of Artificial Sequence: Synthetic oligonucleotide"
  source 1..20: mol_type = other RNA
tgcagacaggtaagaaaaac

SEQ ID NO: 3130 - RNA, 20 nt, synthetic construct
  misc_feature 1..20: note = source = /note="Description of Artificial Sequence: Synthetic oligonucleotide"
  source 1..20: mol_type = other RNA
gtgcagacaggtaagaaaaa

SEQ ID NO: 3131 - RNA, 20 nt, synthetic construct
  misc_feature 1..20: note = source = /note="Description of Artificial Sequence: Synthetic oligonucleotide"
  source 1..20: mol_type = other RNA
gtgcccttcttagtgcagac

SEQ ID NO: 3132 - RNA, 20 nt, synthetic construct
  misc_feature 1..20: note = source = /note="Description of Artificial Sequence: Synthetic oligonucleotide"
  source 1..20: mol_type = other RNA
taataattatggtatttaat

SEQ ID NO: 3133 - RNA, 20 nt, synthetic construct
  misc_feature 1..20: note = source = /note="Description of Artificial Sequence: Synthetic oligonucleotide"
  source 1..20: mol_type = other RNA
ctaataattatggtatttaa

SEQ ID NO: 3134 - RNA, 20 nt, synthetic construct
  misc_feature 1..20: note = source = /note="Description of Artificial Sequence: Synthetic oligonucleotide"
  source 1..20: mol_type = other RNA
ggcagcacaactaataatta

SEQ ID NO: 3135 - RNA, 20 nt, synthetic construct
  misc_feature 1..20: note = source = /note="Description of Artificial Sequence: Synthetic oligonucleotide"
  source 1..20: mol_type = other RNA
attctggtgctctacttcag

SEQ ID NO: 3136 - RNA, 20 nt, synthetic construct
  misc_feature 1..20: note = source = /note="Description of Artificial Sequence: Synthetic oligonucleotide"
  source 1..20: mol_type = other RNA
attgtattactctcacattc

SEQ ID NO: 3137 - RNA, 20 nt, synthetic construct
  misc_feature 1..20: note = source = /note="Description of Artificial Sequence: Synthetic oligonucleotide"
  source 1..20: mol_type = other RNA
ttatggatagaatctgggtg

SEQ ID NO: 3138 - RNA, 20 nt, synthetic construct
  misc_feature 1..20: note = source = /note="Description of Artificial Sequence: Synthetic oligonucleotide"
  source 1..20: mol_type = other RNA
gtatgttatggatagaatct

SEQ ID NO: 3139 - RNA, 20 nt, synthetic construct
  misc_feature 1..20: note = source = /note="Description of Artificial Sequence: Synthetic oligonucleotide"
  source 1..20: mol_type = other RNA
agtatgttatggatagaatc

SEQ ID NO: 3140 - RNA, 20 nt, synthetic construct
  misc_feature 1..20: note = source = /note="Description of Artificial Sequence: Synthetic oligonucleotide"
  source 1..20: mol_type = other RNA
aagaccaggacagtatgtta

SEQ ID NO: 3141 - RNA, 20 nt, synthetic construct
  misc_feature 1..20: note = source = /note="Description of Artificial Sequence: Synthetic oligonucleotide"
  source 1..20: mol_type = other RNA
ttaaaaaaattaataagacc

SEQ ID NO: 3142 - RNA, 20 nt, synthetic construct
  misc_feature 1..20: note = source = /note="Description of Artificial Sequence: Synthetic oligonucleotide"
  source 1..20: mol_type = other RNA
aaagtgctaaaagaacaaac

SEQ ID NO: 3143 - RNA, 20 nt, synthetic construct
  misc_feature 1..20: note = source = /note="Description of Artificial Sequence: Synthetic oligonucleotide"
  source 1..20: mol_type = other RNA
aagagacttcaaacaaaagc

SEQ ID NO: 3144 - RNA, 20 nt, synthetic construct
  misc_feature 1..20: note = source = /note="Description of Artificial Sequence: Synthetic oligonucleotide"
  source 1..20: mol_type = other RNA
tgagataactttacagccaa

SEQ ID NO: 3145 - RNA, 20 nt, synthetic construct
  misc_feature 1..20: note = source = /note="Description of Artificial Sequence: Synthetic oligonucleotide"
  source 1..20: mol_type = other RNA
aatcatctgaattaattaca

SEQ ID NO: 3146 - RNA, 20 nt, synthetic construct
  misc_feature 1..20: note = source = /note="Description of Artificial Sequence: Synthetic oligonucleotide"
  source 1..20: mol_type = other RNA
taatcatctgaattaattac

SEQ ID NO: 3147 - RNA, 20 nt, synthetic construct
  misc_feature 1..20: note = source = /note="Description of Artificial Sequence: Synthetic oligonucleotide"
  source 1..20: mol_type = other RNA
tcttctgttataatgtatat

SEQ ID NO: 3148 - RNA, 20 nt, synthetic construct
  misc_feature 1..20: note = source = /note="Description of Artificial Sequence: Synthetic oligonucleotide"
  source 1..20: mol_type = other RNA
agacactgtatttgtagaaa

SEQ ID NO: 3149 - RNA, 20 nt, synthetic construct
  misc_feature 1..20: note = source = /note="Description of Artificial Sequence: Synthetic oligonucleotide"
  source 1..20: mol_type = other RNA
tacatttggtacattaaaat

SEQ ID NO: 3150 - RNA, 20 nt, synthetic construct
  misc_feature 1..20: note = source = /note="Description of Artificial Sequence: Synthetic oligonucleotide"
  source 1..20: mol_type = other RNA
ttcttttcatcagttacatt

SEQ ID NO: 3151 - RNA, 20 nt, synthetic construct
  misc_feature 1..20: note = source = /note="Description of Artificial Sequence: Synthetic oligonucleotide"
  source 1..20: mol_type = other RNA
ttttgaaaggtacccattta

SEQ ID NO: 3152 - RNA, 20 nt, synthetic construct
  misc_feature 1..20: note = source = /note="Description of Artificial Sequence: Synthetic oligonucleotide"
  source 1..20: mol_type = other RNA
ttttttccttcatttttgaa

SEQ ID NO: 3153 - RNA, 20 nt, synthetic construct
  misc_feature 1..20: note = source = /note="Description of Artificial Sequence: Synthetic oligonucleotide"
  source 1..20: mol_type = other RNA
actaaaataaataatttata

SEQ ID NO: 3154 - RNA, 20 nt, synthetic construct
  misc_feature 1..20: note = source = /note="Description of Artificial Sequence: Synthetic oligonucleotide"
  source 1..20: mol_type = other RNA
aagataaaatctataaaaca

SEQ ID NO: 3155 - RNA, 20 nt, synthetic construct
  misc_feature 1..20: note = source = /note="Description of Artificial Sequence: Synthetic oligonucleotide"
  source 1..20: mol_type = other RNA
aaccatttcagtggctagat

SEQ ID NO: 3156 - RNA, 20 nt, synthetic construct
  misc_feature 1..20: note = source = /note="Description of Artificial Sequence: Synthetic oligonucleotide"
  source 1..20: mol_type = other RNA
tggagaaaaaaccatttcag

SEQ ID NO: 3157 - RNA, 20 nt, synthetic construct
  misc_feature 1..20: note = source = /note="Description of Artificial Sequence: Synthetic oligonucleotide"
  source 1..20: mol_type = other RNA
tgtagataatataacttcac

SEQ ID NO: 3158 - RNA, 20 nt, synthetic construct
  misc_feature 1..20: note = source = /note="Description of Artificial Sequence: Synthetic oligonucleotide"
  source 1..20: mol_type = other RNA
gtttttccacaagcgtaatg

SEQ ID NO: 3159 - RNA, 20 nt, synthetic construct
  misc_feature 1..20: note = source = /note="Description of Artificial Sequence: Synthetic oligonucleotide"
  source 1..20: mol_type = other RNA
ttaaatcttagccattaata

SEQ ID NO: 3160 - RNA, 20 nt, synthetic construct
  misc_feature 1..20: note = source = /note="Description of Artificial Sequence: Synthetic oligonucleotide"
  source 1..20: mol_type = other RNA
tacggtgacgtgaggtcgga

SEQ ID NO: 3161 - RNA, 20 nt, synthetic construct
  misc_feature 1..20: note = source = /note="Description of Artificial Sequence: Synthetic oligonucleotide"
  source 1..20: mol_type = other RNA
gtacggtgacgtgaggtcgg

SEQ ID NO: 3162 - RNA, 20 nt, synthetic construct
  misc_feature 1..20: note = source = /note="Description of Artificial Sequence: Synthetic oligonucleotide"
  source 1..20: mol_type = other RNA
gcgaacttgggtcttcctcc

SEQ ID NO: 3163 - RNA, 20 nt, synthetic construct
  misc_feature 1..20: note = source = /note="Description of Artificial Sequence: Synthetic oligonucleotide"
  source 1..20: mol_type = other RNA
ttagcgaacttgggtcttcc

SEQ ID NO: 3164 - RNA, 20 nt, synthetic construct
  misc_feature 1..20: note = source = /note="Description of Artificial Sequence: Synthetic oligonucleotide"
  source 1..20: mol_type = other RNA
ctcttagcgaacttgggtct

SEQ ID NO: 3165 - RNA, 20 nt, synthetic construct
  misc_feature 1..20: note = source = /note="Description of Artificial Sequence: Synthetic oligonucleotide"
  source 1..20: mol_type = other RNA
cgatgagccctccgactctg

SEQ ID NO: 3166 - RNA, 20 nt, synthetic construct
  misc_feature 1..20: note = source = /note="Description of Artificial Sequence: Synthetic oligonucleotide"
  source 1..20: mol_type = other RNA
atattagggtcgatgagccc

SEQ ID NO: 3167 - RNA, 20 nt, synthetic construct
  misc_feature 1..20: note = source = /note="Description of Artificial Sequence: Synthetic oligonucleotide"
  source 1..20: mol_type = other RNA
cggatattagggtcgatgag

SEQ ID NO: 3168 - RNA, 20 nt, synthetic construct
  misc_feature 1..20: note = source = /note="Description of Artificial Sequence: Synthetic oligonucleotide"
  source 1..20: mol_type = other RNA
acggatattagggtcgatga

SEQ ID NO: 3169 - RNA, 20 nt, synthetic construct
  misc_feature 1..20: note = source = /note="Description of Artificial Sequence: Synthetic oligonucleotide"
  source 1..20: mol_type = other RNA
ttaatcggtccgtaccaccg

SEQ ID NO: 3170 - RNA, 20 nt, synthetic construct
  misc_feature 1..20: note = source = /note="Description of Artificial Sequence: Synthetic oligonucleotide"
  source 1..20: mol_type = other RNA
gtttttaatcggtccgtacc

SEQ ID NO: 3171 - RNA, 20 nt, synthetic construct
  misc_feature 1..20: note = source = /note="Description of Artificial Sequence: Synthetic oligonucleotide"
  source 1..20: mol_type = other RNA
tacgtttttaatcggtccgt

SEQ ID NO: 3172 - RNA, 20 nt, synthetic construct
  misc_feature 1..20: note = source = /note="Description of Artificial Sequence: Synthetic oligonucleotide"
  source 1..20: mol_type = other RNA
atttttacgtttttaatcgg

SEQ ID NO: 3173 - RNA, 20 nt, synthetic construct
  misc_feature 1..20: note = source = /note="Description of Artificial Sequence: Synthetic oligonucleotide"
  source 1..20: mol_type = other RNA
gctctggtcggatcggatgt

SEQ ID NO: 3174 - RNA, 20 nt, synthetic construct
  misc_feature 1..20: note = source = /note="Description of Artificial Sequence: Synthetic oligonucleotide"
  source 1..20: mol_type = other RNA
ccccacctagtgatctccag

SEQ ID NO: 3175 - RNA, 20 nt, synthetic construct
  misc_feature 1..20: note = source = /note="Description of Artificial Sequence: Synthetic oligonucleotide"
  source 1..20: mol_type = other RNA
tcttcccccacctagtgatc

SEQ ID NO: 3176 - RNA, 20 nt, synthetic construct
  misc_feature 1..20: note = source = /note="Description of Artificial Sequence: Synthetic oligonucleotide"
  source 1..20: mol_type = other RNA
gaaatccttcgtcttccccc

SEQ ID NO: 3177 - RNA, 20 nt, synthetic construct
  misc_feature 1..20: note = source = /note="Description of Artificial Sequence: Synthetic oligonucleotide"
  source 1..20: mol_type = other RNA
cgtgaaatccttcgtcttcc

SEQ ID NO: 3178 - RNA, 20 nt, synthetic construct
  misc_feature 1..20: note = source = /note="Description of Artificial Sequence: Synthetic oligonucleotide"
  source 1..20: mol_type = other RNA
tcgtgaaatccttcgtcttc

SEQ ID NO: 3179 - RNA, 20 nt, synthetic construct
  misc_feature 1..20: note = source = /note="Description of Artificial Sequence: Synthetic oligonucleotide"
  source 1..20: mol_type = other RNA
gtcgtgaaatccttcgtctt

SEQ ID NO: 3180 - RNA, 20 nt, synthetic construct
  misc_feature 1..20: note = source = /note="Description of Artificial Sequence: Synthetic oligonucleotide"
  source 1..20: mol_type = other RNA
ggtcgtgaaatccttcgtct

SEQ ID NO: 3181 - RNA, 20 nt, synthetic construct
  misc_feature 1..20: note = source = /note="Description of Artificial Sequence: Synthetic oligonucleotide"
  source 1..20: mol_type = other RNA
cggacattagggtcgtgaaa

SEQ ID NO: 3182 - RNA, 20 nt, synthetic construct
  misc_feature 1..20: note = source = /note="Description of Artificial Sequence: Synthetic oligonucleotide"
  source 1..20: mol_type = other RNA
aaataagttccggtccggct

SEQ ID NO: 3183 - RNA, 20 nt, synthetic construct
  misc_feature 1..20: note = source = /note="Description of Artificial Sequence: Synthetic oligonucleotide"
  source 1..20: mol_type = other RNA
taacagtaaataagttccgg

SEQ ID NO: 3184 - RNA, 20 nt, synthetic construct
  misc_feature 1..20: note = source = /note="Description of Artificial Sequence: Synthetic oligonucleotide"
  source 1..20: mol_type = other RNA
agttgtaacagtaaataagt

SEQ ID NO: 3185 - RNA, 20 nt, synthetic construct
  misc_feature 1..20: note = source = /note="Description of Artificial Sequence: Synthetic oligonucleotide"
  source 1..20: mol_type = other RNA
cccatgctcttgaaaaatgt

SEQ ID NO: 3186 - RNA, 20 nt, synthetic construct
  misc_feature 1..20: note = source = /note="Description of Artificial Sequence: Synthetic oligonucleotide"
  source 1..20: mol_type = other RNA
cccaaaaaccccgaggatta

SEQ ID NO: 3187 - RNA, 20 nt, synthetic construct
  misc_feature 1..20: note = source = /note="Description of Artificial Sequence: Synthetic oligonucleotide"
  source 1..20: mol_type = other RNA
atagtttcccaaaaaccccg

SEQ ID NO: 3188 - RNA, 20 nt, synthetic construct
  misc_feature 1..20: note = source = /note="Description of Artificial Sequence: Synthetic oligonucleotide"
  source 1..20: mol_type = other RNA
ttcattatatcttttacaat

SEQ ID NO: 3189 - RNA, 20 nt, synthetic construct
  misc_feature 1..20: note = source = /note="Description of Artificial Sequence: Synthetic oligonucleotide"
  source 1..20: mol_type = other RNA
attcattatatcttttacaa

SEQ ID NO: 3190 - RNA, 20 nt, synthetic construct
  misc_feature 1..20: note = source = /note="Description of Artificial Sequence: Synthetic oligonucleotide"
  source 1..20: mol_type = other RNA
ttttacctctcttcctatct

SEQ ID NO: 3191 - RNA, 20 nt, synthetic construct
  misc_feature 1..20: note = source = /note="Description of Artificial Sequence: Synthetic oligonucleotide"
  source 1..20: mol_type = other RNA
caatggctttccttgggtga

SEQ ID NO: 3192 - RNA, 20 nt, synthetic construct
  misc_feature 1..20: note = source = /note="Description of Artificial Sequence: Synthetic oligonucleotide"
  source 1..20: mol_type = other RNA
agtattcaatggctttcctt

SEQ ID NO: 3193 - RNA, 20 nt, synthetic construct
  misc_feature 1..20: note = source = /note="Description of Artificial Sequence: Synthetic oligonucleotide"
  source 1..20: mol_type = other RNA
cagtattcaatggctttcct

SEQ ID NO: 3194 - RNA, 20 nt, synthetic construct
  misc_feature 1..20: note = source = /note="Description of Artificial Sequence: Synthetic oligonucleotide"
  source 1..20: mol_type = other RNA
atgacccattcagtattcaa

SEQ ID NO: 3195 - RNA, 20 nt, synthetic construct
  misc_feature 1..20: note = source = /note="Description of Artificial Sequence: Synthetic oligonucleotide"
  source 1..20: mol_type = other RNA
accagagatatacactaagt

SEQ ID NO: 3196 - RNA, 20 nt, synthetic construct
  misc_feature 1..20: note = source = /note="Description of Artificial Sequence: Synthetic oligonucleotide"
  source 1..20: mol_type = other RNA
agtgtaaactgagatattat

SEQ ID NO: 3197 - RNA, 20 nt, synthetic construct
  misc_feature 1..20: note = source = /note="Description of Artificial Sequence: Synthetic oligonucleotide"
  source 1..20: mol_type = other RNA
cagtgtaaactgagatatta

SEQ ID NO: 3198 - RNA, 20 nt, synthetic construct
  misc_feature 1..20: note = source = /note="Description of Artificial Sequence: Synthetic oligonucleotide"
  source 1..20: mol_type = other RNA
tttctacttcctctatttgc

SEQ ID NO: 3199 - RNA, 20 nt, synthetic construct
  misc_feature 1..20: note = source = /note="Description of Artificial Sequence: Synthetic oligonucleotide"
  source 1..20: mol_type = other RNA
tgctctacctaattcaattt

SEQ ID NO: 3200 - RNA, 20 nt, synthetic construct
  misc_feature 1..20: note = source = /note="Description of Artificial Sequence: Synthetic oligonucleotide"
  source 1..20: mol_type = other RNA
aaaaaaaaaaaccaaaaaag

SEQ ID NO: 3201 - RNA, 20 nt, synthetic construct
  misc_feature 1..20: note = source = /note="Description of Artificial Sequence: Synthetic oligonucleotide"
  source 1..20: mol_type = other RNA
aaggaattatcactaactaa

SEQ ID NO: 3202 - RNA, 20 nt, synthetic construct
  misc_feature 1..20: note = source = /note="Description of Artificial Sequence: Synthetic oligonucleotide"
  source 1..20: mol_type = other RNA
caaggaattatcactaacta

SEQ ID NO: 3203 - RNA, 20 nt, synthetic construct
  misc_feature 1..20: note = source = /note="Description of Artificial Sequence: Synthetic oligonucleotide"
  source 1..20: mol_type = other RNA
aaatgagcatacagatgtca

SEQ ID NO: 3204 - RNA, 20 nt, synthetic construct
  misc_feature 1..20: note = source = /note="Description of Artificial Sequence: Synthetic oligonucleotide"
  source 1..20: mol_type = other RNA
aagagaagcctactattttt

SEQ ID NO: 3205 - RNA, 20 nt, synthetic construct
  misc_feature 1..20: note = source = /note="Description of Artificial Sequence: Synthetic oligonucleotide"
  source 1..20: mol_type = other RNA
tgtgaccgcgtgtaactgga

SEQ ID NO: 3206 - RNA, 20 nt, synthetic construct
  misc_feature 1..20: note = source = /note="Description of Artificial Sequence: Synthetic oligonucleotide"
  source 1..20: mol_type = other RNA
ttgatgtgaccgcgtgtaac

SEQ ID NO: 3207 - RNA, 20 nt, synthetic construct
  misc_feature 1..20: note = source = /note="Description of Artificial Sequence: Synthetic oligonucleotide"
  source 1..20: mol_type = other RNA
aaatactgctgccacgtgca

SEQ ID NO: 3208 - RNA, 20 nt, synthetic construct
  misc_feature 1..20: note = source = /note="Description of Artificial Sequence: Synthetic oligonucleotide"
  source 1..20: mol_type = other RNA
gagtctctggaatcctagga

SEQ ID NO: 3209 - RNA, 20 nt, synthetic construct
  misc_feature 1..20: note = source = /note="Description of Artificial Sequence: Synthetic oligonucleotide"
  source 1..20: mol_type = other RNA
ataagagtctctggaatcct

SEQ ID NO: 3210 - RNA, 20 nt, synthetic construct
  misc_feature 1..20: note = source = /note="Description of Artificial Sequence: Synthetic oligonucleotide"
  source 1..20: mol_type = other RNA
cactgttacataagagtctc

SEQ ID NO: 3211 - RNA, 20 nt, synthetic construct
  misc_feature 1..20: note = source = /note="Description of Artificial Sequence: Synthetic oligonucleotide"
  source 1..20: mol_type = other RNA
cagagccagacaagggctcc

SEQ ID NO: 3212 - RNA, 20 nt, synthetic construct
  misc_feature 1..20: note = source = /note="Description of Artificial Sequence: Synthetic oligonucleotide"
  source 1..20: mol_type = other RNA
accctatcagagccagacaa

SEQ ID NO: 3213 - RNA, 20 nt, synthetic construct
  misc_feature 1..20: note = source = /note="Description of Artificial Sequence: Synthetic oligonucleotide"
  source 1..20: mol_type = other RNA
gaccctatcagagccagaca

SEQ ID NO: 3214 - RNA, 20 nt, synthetic construct
  misc_feature 1..20: note = source = /note="Description of Artificial Sequence: Synthetic oligonucleotide"
  source 1..20: mol_type = other RNA
gacctaaacaccttgatctt

SEQ ID NO: 3215 - RNA, 20 nt, synthetic construct
  misc_feature 1..20: note = source = /note="Description of Artificial Sequence: Synthetic oligonucleotide"
  source 1..20: mol_type = other RNA
ggtaggaaaaccatgcgtta

SEQ ID NO: 3216 - RNA, 20 nt, synthetic construct
  misc_feature 1..20: note = source = /note="Description of Artificial Sequence: Synthetic oligonucleotide"
  source 1..20: mol_type = other RNA
tggtaggaaaaccatgcgtt

SEQ ID NO: 3217 - RNA, 20 nt, synthetic construct
  misc_feature 1..20: note = source = /note="Description of Artificial Sequence: Synthetic oligonucleotide"
  source 1..20: mol_type = other RNA
acagcttttgaggctttggt

SEQ ID NO: 3218 - RNA, 20 nt, synthetic construct
  misc_feature 1..20: note = source = /note="Description of Artificial Sequence: Synthetic oligonucleotide"
  source 1..20: mol_type = other RNA
aggcacagcttttgaggctt

SEQ ID NO: 3219 - RNA, 20 nt, synthetic construct
  misc_feature 1..20: note = source = /note="Description of Artificial Sequence: Synthetic oligonucleotide"
  source 1..20: mol_type = other RNA
gtatttaggcacagcttttg

SEQ ID NO: 3220 - RNA, 20 nt, synthetic construct
  misc_feature 1..20: note = source = /note="Description of Artificial Sequence: Synthetic oligonucleotide"
  source 1..20: mol_type = other RNA
aaaagattaatcttgtattt

SEQ ID NO: 3221 - RNA, 20 nt, synthetic construct
  misc_feature 1..20: note = source = /note="Description of Artificial Sequence: Synthetic oligonucleotide"
  source 1..20: mol_type = other RNA
cgcggtgacgtgaggttgga

SEQ ID NO: 3222 - RNA, 20 nt, synthetic construct
  misc_feature 1..20: note = source = /note="Description of Artificial Sequence: Synthetic oligonucleotide"
  source 1..20: mol_type = other RNA
caacgtcactcggctctagc

SEQ ID NO: 3223 - RNA, 20 nt, synthetic construct
  misc_feature 1..20: note = source = /note="Description of Artificial Sequence: Synthetic oligonucleotide"
  source 1..20: mol_type = other RNA
gcgaacttggccactccgcc

SEQ ID NO: 3224 - RNA, 20 nt, synthetic construct
  misc_feature 1..20: note = source = /note="Description of Artificial Sequence: Synthetic oligonucleotide"
  source 1..20: mol_type = other RNA
ttagcgaacttggccactcc

SEQ ID NO: 3225 - RNA, 20 nt, synthetic construct
  misc_feature 1..20: note = source = /note="Description of Artificial Sequence: Synthetic oligonucleotide"
  source 1..20: mol_type = other RNA
ctcttagcgaacttggccac

SEQ ID NO: 3226 - RNA, 20 nt, synthetic construct
  misc_feature 1..20: note = source = /note="Description of Artificial Sequence: Synthetic oligonucleotide"
  source 1..20: mol_type = other RNA
ccgacctcttagcgaacttg

SEQ ID NO: 3227 - RNA, 20 nt, synthetic construct
  misc_feature 1..20: note = source = /note="Description of Artificial Sequence: Synthetic oligonucleotide"
  source 1..20: mol_type = other RNA
cgatgaacccacagactccg

SEQ ID NO: 3228 - RNA, 20 nt, synthetic construct
  misc_feature 1..20: note = source = /note="Description of Artificial Sequence: Synthetic oligonucleotide"
  source 1..20: mol_type = other RNA
gggtcgatgaacccacagac

SEQ ID NO: 3229 - RNA, 20 nt, synthetic construct
  misc_feature 1..20: note = source = /note="Description of Artificial Sequence: Synthetic oligonucleotide"
  source 1..20: mol_type = other RNA
cggatattagggtcgatgaa

SEQ ID NO: 3230 - RNA, 20 nt, synthetic construct
  misc_feature 1..20: note = source = /note="Description of Artificial Sequence: Synthetic oligonucleotide"
  source 1..20: mol_type = other RNA
acggatattagggtcgatga

SEQ ID NO: 3231 - RNA, 20 nt, synthetic construct
  misc_feature 1..20: note = source = /note="Description of Artificial Sequence: Synthetic oligonucleotide"
  source 1..20: mol_type = other RNA
tgttttaatcggcccgcacc

SEQ ID NO: 3232 - RNA, 20 nt, synthetic construct
  misc_feature 1..20: note = source = /note="Description of Artificial Sequence: Synthetic oligonucleotide"
  source 1..20: mol_type = other RNA
ttatgttttaatcggcccgc

SEQ ID NO: 3233 - RNA, 20 nt, synthetic construct
  misc_feature 1..20: note = source = /note="Description of Artificial Sequence: Synthetic oligonucleotide"
  source 1..20: mol_type = other RNA
gatttttatgttttaatcgg

SEQ ID NO: 3234 - RNA, 20 nt, synthetic construct
  misc_feature 1..20: note = source = /note="Description of Artificial Sequence: Synthetic oligonucleotide"
  source 1..20: mol_type = other RNA
tgatttttatgttttaatcg

SEQ ID NO: 3235 - RNA, 20 nt, synthetic construct
  misc_feature 1..20: note = source = /note="Description of Artificial Sequence: Synthetic oligonucleotide"
  source 1..20: mol_type = other RNA
gttgtggtccgactggttgt

SEQ ID NO: 3236 - RNA, 20 nt, synthetic construct
  misc_feature 1..20: note = source = /note="Description of Artificial Sequence: Synthetic oligonucleotide"
  source 1..20: mol_type = other RNA
attcagccctcaagttgtgg

SEQ ID NO: 3237 - RNA, 20 nt, synthetic construct
  misc_feature 1..20: note = source = /note="Description of Artificial Sequence: Synthetic oligonucleotide"
  source 1..20: mol_type = other RNA
gttcgcctagtggaattcag

SEQ ID NO: 3238 - RNA, 20 nt, synthetic construct
  misc_feature 1..20: note = source = /note="Description of Artificial Sequence: Synthetic oligonucleotide"
  source 1..20: mol_type = other RNA
cgttcgcctagtggaattca

SEQ ID NO: 3239 - RNA, 20 nt, synthetic construct
  misc_feature 1..20: note = source = /note="Description of Artificial Sequence: Synthetic oligonucleotide"
  source 1..20: mol_type = other RNA
gaaaccccccggcttcgttc

SEQ ID NO: 3240 - RNA, 20 nt, synthetic construct
  misc_feature 1..20: note = source = /note="Description of Artificial Sequence: Synthetic oligonucleotide"
  source 1..20: mol_type = other RNA
acattagggtcgtgaaaccc

SEQ ID NO: 3241 - RNA, 20 nt, synthetic construct
  misc_feature 1..20: note = source = /note="Description of Artificial Sequence: Synthetic oligonucleotide"
  source 1..20: mol_type = other RNA
gacattagggtcgtgaaacc

SEQ ID NO: 3242 - RNA, 20 nt, synthetic construct
  misc_feature 1..20: note = source = /note="Description of Artificial Sequence: Synthetic oligonucleotide"
  source 1..20: mol_type = other RNA
ggacattagggtcgtgaaac

SEQ ID NO: 3243 - RNA, 20 nt, synthetic construct
  misc_feature 1..20: note = source = /note="Description of Artificial Sequence: Synthetic oligonucleotide"
  source 1..20: mol_type = other RNA
cggacattagggtcgtgaaa

SEQ ID NO: 3244 - RNA, 20 nt, synthetic construct
  misc_feature 1..20: note = source = /note="Description of Artificial Sequence: Synthetic oligonucleotide"
  source 1..20: mol_type = other RNA
tcggacattagggtcgtgaa

SEQ ID NO: 3245 - RNA, 20 nt, synthetic construct
  misc_feature 1..20: note = source = /note="Description of Artificial Sequence: Synthetic oligonucleotide"
  source 1..20: mol_type = other RNA
ttaatcttacgacccgcgcc

SEQ ID NO: 3246 - RNA, 20 nt, synthetic construct
  misc_feature 1..20: note = source = /note="Description of Artificial Sequence: Synthetic oligonucleotide"
  source 1..20: mol_type = other RNA
agattaatcttacgacccgc

SEQ ID NO: 3247 - RNA, 20 nt, synthetic construct
  misc_feature 1..20: note = source = /note="Description of Artificial Sequence: Synthetic oligonucleotide"
  source 1..20: mol_type = other RNA
taaaaagattaatcttacga

SEQ ID NO: 3248 - RNA, 20 nt, synthetic construct
  misc_feature 1..20: note = source = /note="Description of Artificial Sequence: Synthetic oligonucleotide"
  source 1..20: mol_type = other RNA
ataaaaagattaatcttacg

SEQ ID NO: 3249 - RNA, 20 nt, synthetic construct
  misc_feature 1..20: note = source = /note="Description of Artificial Sequence: Synthetic oligonucleotide"
  source 1..20: mol_type = other RNA
atgactagttgtttgctgca

SEQ ID NO: 3250 - RNA, 20 nt, synthetic construct
  misc_feature 1..20: note = source = /note="Description of Artificial Sequence: Synthetic oligonucleotide"
  source 1..20: mol_type = other RNA
catgactagttgtttgctgc

SEQ ID NO: 3251 - RNA, 20 nt, synthetic construct
  misc_feature 1..20: note = source = /note="Description of Artificial Sequence: Synthetic oligonucleotide"
  source 1..20: mol_type = other RNA
cccaaatcacaaaaatggtt

SEQ ID NO: 3252 - RNA, 20 nt, synthetic construct
  misc_feature 1..20: note = source = /note="Description of Artificial Sequence: Synthetic oligonucleotide"
  source 1..20: mol_type = other RNA
gtttccccaaatcacaaaaa

SEQ ID NO: 3253 - RNA, 20 nt, synthetic construct
  misc_feature 1..20: note = source = /note="Description of Artificial Sequence: Synthetic oligonucleotide"
  source 1..20: mol_type = other RNA
attttgtgaggctgggaggc

SEQ ID NO: 3254 - RNA, 20 nt, synthetic construct
  misc_feature 1..20: note = source = /note="Description of Artificial Sequence: Synthetic oligonucleotide"
  source 1..20: mol_type = other RNA
aggcattttgtgaggctggg

SEQ ID NO: 3255 - RNA, 20 nt, synthetic construct
  misc_feature 1..20: note = source = /note="Description of Artificial Sequence: Synthetic oligonucleotide"
  source 1..20: mol_type = other RNA
taaaggcattttgtgaggct

SEQ ID NO: 3256 - RNA, 20 nt, synthetic construct
  misc_feature 1..20: note = source = /note="Description of Artificial Sequence: Synthetic oligonucleotide"
  source 1..20: mol_type = other RNA
ttaaaggcattttgtgaggc

SEQ ID NO: 3257 - RNA, 20 nt, synthetic construct
  misc_feature 1..20: note = source = /note="Description of Artificial Sequence: Synthetic oligonucleotide"
  source 1..20: mol_type = other RNA
ttttttaaaggcattttgtg

SEQ ID NO: 3258 - RNA, 20 nt, synthetic construct
  misc_feature 1..20: note = source = /note="Description of Artificial Sequence: Synthetic oligonucleotide"
  source 1..20: mol_type = other RNA
cggaagatgtaattttttaa

SEQ ID NO: 3259 - RNA, 20 nt, synthetic construct
  misc_feature 1..20: note = source = /note="Description of Artificial Sequence: Synthetic oligonucleotide"
  source 1..20: mol_type = other RNA
taatgtccgcactcggtagg

SEQ ID NO: 3260 - RNA, 20 nt, synthetic construct
  misc_feature 1..20: note = source = /note="Description of Artificial Sequence: Synthetic oligonucleotide"
  source 1..20: mol_type = other RNA
agggttttacggccctaatg

SEQ ID NO: 3261 - RNA, 20 nt, synthetic construct
  misc_feature 1..20: note = source = /note="Description of Artificial Sequence: Synthetic oligonucleotide"
  source 1..20: mol_type = other RNA
ggaaccggagggttttacgg

SEQ ID NO: 3262 - RNA, 20 nt, synthetic construct
  misc_feature 1..20: note = source = /note="Description of Artificial Sequence: Synthetic oligonucleotide"
  source 1..20: mol_type = other RNA
cggaaccggagggttttacg

SEQ ID NO: 3263 - RNA, 20 nt, synthetic construct
  misc_feature 1..20: note = source = /note="Description of Artificial Sequence: Synthetic oligonucleotide"
  source 1..20: mol_type = other RNA
gctagagaacggtgggcgga

SEQ ID NO: 3264 - RNA, 20 nt, synthetic construct
  misc_feature 1..20: note = source = /note="Description of Artificial Sequence: Synthetic oligonucleotide"
  source 1..20: mol_type = other RNA
cccaaaagtggcacaaccgg

SEQ ID NO: 3265 - RNA, 20 nt, synthetic construct
  misc_feature 1..20: note = source = /note="Description of Artificial Sequence: Synthetic oligonucleotide"
  source 1..20: mol_type = other RNA
ctctgcccaaaagtggcaca

SEQ ID NO: 3266 - RNA, 20 nt, synthetic construct
  misc_feature 1..20: note = source = /note="Description of Artificial Sequence: Synthetic oligonucleotide"
  source 1..20: mol_type = other RNA
aaacataaaaatcgtctctg

SEQ ID NO: 3267 - RNA, 20 nt, synthetic construct
  misc_feature 1..20: note = source = /note="Description of Artificial Sequence: Synthetic oligonucleotide"
  source 1..20: mol_type = other RNA
aaaacataaaaatcgtctct

SEQ ID NO: 3268 - RNA, 20 nt, synthetic construct
  misc_feature 1..20: note = source = /note="Description of Artificial Sequence: Synthetic oligonucleotide"
  source 1..20: mol_type = other RNA
agggttcatcgaccctaatg

SEQ ID NO: 3269 - RNA, 20 nt, synthetic construct
  misc_feature 1..20: note = source = /note="Description of Artificial Sequence: Synthetic oligonucleotide"
  source 1..20: mol_type = other RNA
ggtgtcagagggttcatcga

SEQ ID NO: 3270 - RNA, 20 nt, synthetic construct
  misc_feature 1..20: note = source = /note="Description of Artificial Sequence: Synthetic oligonucleotide"
  source 1..20: mol_type = other RNA
cggtgtcagagggttcatcg

SEQ ID NO: 3271 - RNA, 20 nt, synthetic construct
  misc_feature 1..20: note = source = /note="Description of Artificial Sequence: Synthetic oligonucleotide"
  source 1..20: mol_type = other RNA
tgacgttggaggcggagggc

SEQ ID NO: 3272 - RNA, 20 nt, synthetic construct
  misc_feature 1..20: note = source = /note="Description of Artificial Sequence: Synthetic oligonucleotide"
  source 1..20: mol_type = other RNA
gtgacgttggaggcggaggg

SEQ ID NO: 3273 - RNA, 20 nt, synthetic construct
  misc_feature 1..20: note = source = /note="Description of Artificial Sequence: Synthetic oligonucleotide"
  source 1..20: mol_type = other RNA
agtgacgttggaggcggagg

SEQ ID NO: 3274 - RNA, 20 nt, synthetic construct
  misc_feature 1..20: note = source = /note="Description of Artificial Sequence: Synthetic oligonucleotide"
  source 1..20: mol_type = other RNA
cctcacgtcaccgcgctaga

SEQ ID NO: 3275 - RNA, 20 nt, synthetic construct
  misc_feature 1..20: note = source = /note="Description of Artificial Sequence: Synthetic oligonucleotide"
  source 1..20: mol_type = other RNA
cagcggtccgacctcacgtc

SEQ ID NO: 3276 - RNA, 20 nt, synthetic construct
  misc_feature 1..20: note = source = /note="Description of Artificial Sequence: Synthetic oligonucleotide"
  source 1..20: mol_type = other RNA
cagagcaagacagcggtccg

SEQ ID NO: 3277 - RNA, 20 nt, synthetic construct
  misc_feature 1..20: note = source = /note="Description of Artificial Sequence: Synthetic oligonucleotide"
  source 1..20: mol_type = other RNA
gcctcagagcaagacagcgg

SEQ ID NO: 3278 - RNA, 20 nt, synthetic construct
  misc_feature 1..20: note = source = /note="Description of Artificial Sequence: Synthetic oligonucleotide"
  source 1..20: mol_type = other RNA
gaaaaaaaaaaaaagactct

SEQ ID NO: 3279 - RNA, 20 nt, synthetic construct
  misc_feature 1..20: note = source = /note="Description of Artificial Sequence: Synthetic oligonucleotide"
  source 1..20: mol_type = other RNA
ctggtcagaccgtttagttt

SEQ ID NO: 3280 - RNA, 20 nt, synthetic construct
  misc_feature 1..20: note = source = /note="Description of Artificial Sequence: Synthetic oligonucleotide"
  source 1..20: mol_type = other RNA
tctggtcagaccgtttagtt

SEQ ID NO: 3281 - RNA, 20 nt, synthetic construct
  misc_feature 1..20: note = source = /note="Description of Artificial Sequence: Synthetic oligonucleotide"
  source 1..20: mol_type = other RNA
gagttttcttgagtgttttc

SEQ ID NO: 3282 - RNA, 20 nt, synthetic construct
  misc_feature 1..20: note = source = /note="Description of Artificial Sequence: Synthetic oligonucleotide"
  source 1..20: mol_type = other RNA
gcaggtataatggtatacta

SEQ ID NO: 3283 - RNA, 20 nt, synthetic construct
  misc_feature 1..20: note = source = /note="Description of Artificial Sequence: Synthetic oligonucleotide"
  source 1..20: mol_type = other RNA
aaggggagaggcaggtataa

SEQ ID NO: 3284 - RNA, 20 nt, synthetic construct
  misc_feature 1..20: note = source = /note="Description of Artificial Sequence: Synthetic oligonucleotide"
  source 1..20: mol_type = other RNA
gatggggaaaggggagaggc

SEQ ID NO: 3285 - RNA, 20 nt, synthetic construct
  misc_feature 1..20: note = source = /note="Description of Artificial Sequence: Synthetic oligonucleotide"
  source 1..20: mol_type = other RNA
agaggatggggaaaggggag

SEQ ID NO: 3286 - RNA, 20 nt, synthetic construct
  misc_feature 1..20: note = source = /note="Description of Artificial Sequence: Synthetic oligonucleotide"
  source 1..20: mol_type = other RNA
tttacagaggatggggaaag

SEQ ID NO: 3287 - RNA, 20 nt, synthetic construct
  misc_feature 1..20: note = source = /note="Description of Artificial Sequence: Synthetic oligonucleotide"
  source 1..20: mol_type = other RNA
atttacagaggatggggaaa

SEQ ID NO: 3288 - RNA, 20 nt, synthetic construct
  misc_feature 1..20: note = source = /note="Description of Artificial Sequence: Synthetic oligonucleotide"
  source 1..20: mol_type = other RNA
aatttacagaggatggggaa

SEQ ID NO: 3289 - RNA, 20 nt, synthetic construct
  misc_feature 1..20: note = source = /note="Description of Artificial Sequence: Synthetic oligonucleotide"
  source 1..20: mol_type = other RNA
gagagaatttacagaggatg

SEQ ID NO: 3290 - RNA, 20 nt, synthetic construct
  misc_feature 1..20: note = source = /note="Description of Artificial Sequence: Synthetic oligonucleotide"
  source 1..20: mol_type = other RNA
tgagagaatttacagaggat

SEQ ID NO: 3291 - RNA, 20 nt, synthetic construct
  misc_feature 1..20: note = source = /note="Description of Artificial Sequence: Synthetic oligonucleotide"
  source 1..20: mol_type = other RNA
ttgagagaatttacagagga

SEQ ID NO: 3292 - RNA, 20 nt, synthetic construct
  misc_feature 1..20: note = source = /note="Description of Artificial Sequence: Synthetic oligonucleotide"
  source 1..20: mol_type = other RNA
aaggttgagagaatttacag

SEQ ID NO: 3293 - RNA, 20 nt, synthetic construct
  misc_feature 1..20: note = source = /note="Description of Artificial Sequence: Synthetic oligonucleotide"
  source 1..20: mol_type = other RNA
atgaaattaaaaatgagaga

SEQ ID NO: 3294 - RNA, 20 nt, synthetic construct
  misc_feature 1..20: note = source = /note="Description of Artificial Sequence: Synthetic oligonucleotide"
  source 1..20: mol_type = other RNA
gttgttttagctctaggtct

SEQ ID NO: 3295 - RNA, 20 nt, synthetic construct
  misc_feature 1..20: note = source = /note="Description of Artificial Sequence: Synthetic oligonucleotide"
  source 1..20: mol_type = other RNA
gttgttgttgttttagctct

SEQ ID NO: 3296 - RNA, 20 nt, synthetic construct
  misc_feature 1..20: note = source = /note="Description of Artificial Sequence: Synthetic oligonucleotide"
  source 1..20: mol_type = other RNA
aaaaatcaatttgggatagg

SEQ ID NO: 3297 - RNA, 20 nt, synthetic construct
  misc_feature 1..20: note = source = /note="Description of Artificial Sequence: Synthetic oligonucleotide"
  source 1..20: mol_type = other RNA
tctaaaaatcaatttgggat

SEQ ID NO: 3298 - RNA, 20 nt, synthetic construct
  misc_feature 1..20: note = source = /note="Description of Artificial Sequence: Synthetic oligonucleotide"
  source 1..20: mol_type = other RNA
aaagctctaaaaatcaattt

SEQ ID NO: 3299 - RNA, 20 nt, synthetic construct
  misc_feature 1..20: note = source = /note="Description of Artificial Sequence: Synthetic oligonucleotide"
  source 1..20: mol_type = other RNA
aaaagctctaaaaatcaatt

SEQ ID NO: 3300 - RNA, 20 nt, synthetic construct
  misc_feature 1..20: note = source = /note="Description of Artificial Sequence: Synthetic oligonucleotide"
  source 1..20: mol_type = other RNA
atacatataccaaatatacg

SEQ ID NO: 3301 - RNA, 20 nt, synthetic construct
  misc_feature 1..20: note = source = /note="Description of Artificial Sequence: Synthetic oligonucleotide"
  source 1..20: mol_type = other RNA
aggcaagaaggcttctattt

SEQ ID NO: 3302 - RNA, 20 nt, synthetic construct
  misc_feature 1..20: note = source = /note="Description of Artificial Sequence: Synthetic oligonucleotide"
  source 1..20: mol_type = other RNA
caattctttgttaggcaaga

SEQ ID NO: 3303 - RNA, 20 nt, synthetic construct
  misc_feature 1..20: note = source = /note="Description of Artificial Sequence: Synthetic oligonucleotide"
  source 1..20: mol_type = other RNA
tctaattacaattctttgtt

SEQ ID NO: 3304 - RNA, 20 nt, synthetic construct
  misc_feature 1..20: note = source = /note="Description of Artificial Sequence: Synthetic oligonucleotide"
  source 1..20: mol_type = other RNA
gatttttcctatctttagaa

SEQ ID NO: 3305 - RNA, 20 nt, synthetic construct
  misc_feature 1..20: note = source = /note="Description of Artificial Sequence: Synthetic oligonucleotide"
  source 1..20: mol_type = other RNA
tggtgcttggtttagctctt

SEQ ID NO: 3306 - RNA, 20 nt, synthetic construct
  misc_feature 1..20: note = source = /note="Description of Artificial Sequence: Synthetic oligonucleotide"
  source 1..20: mol_type = other RNA
ttggtgcttggtttagctct

SEQ ID NO: 3307 - RNA, 20 nt, synthetic construct
  misc_feature 1..20: note = source = /note="Description of Artificial Sequence: Synthetic oligonucleotide"
  source 1..20: mol_type = other RNA
caaaaaacagatttggtgct

SEQ ID NO: 3308 - RNA, 20 nt, synthetic construct
  misc_feature 1..20: note = source = /note="Description of Artificial Sequence: Synthetic oligonucleotide"
  source 1..20: mol_type = other RNA
aaacccccaaaaaacagatt

SEQ ID NO: 3309 - RNA, 20 nt, synthetic construct
  misc_feature 1..20: note = source = /note="Description of Artificial Sequence: Synthetic oligonucleotide"
  source 1..20: mol_type = other RNA
tgaggtcggacccgctgtct

SEQ ID NO: 3310 - RNA, 20 nt, synthetic construct
  misc_feature 1..20: note = source = /note="Description of Artificial Sequence: Synthetic oligonucleotide"
  source 1..20: mol_type = other RNA
gtgaggtcggacccgctgtc

SEQ ID NO: 3311 - RNA, 20 nt, synthetic construct
  misc_feature 1..20: note = source = /note="Description of Artificial Sequence: Synthetic oligonucleotide"
  source 1..20: mol_type = other RNA
cgaggcgaagtgaggtcgga

SEQ ID NO: 3312 - RNA, 20 nt, synthetic construct
  misc_feature 1..20: note = source = /note="Description of Artificial Sequence: Synthetic oligonucleotide"
  source 1..20: mol_type = other RNA
gcgaggcgaagtgaggtcgg

SEQ ID NO: 3313 - RNA, 20 nt, synthetic construct
  misc_feature 1..20: note = source = /note="Description of Artificial Sequence: Synthetic oligonucleotide"
  source 1..20: mol_type = other RNA
ttgggtcctccgcctccaac

SEQ ID NO: 3314 - RNA, 20 nt, synthetic construct
  misc_feature 1..20: note = source = /note="Description of Artificial Sequence: Synthetic oligonucleotide"
  source 1..20: mol_type = other RNA
acgaccttgggtcctccgcc

SEQ ID NO: 3315 - RNA, 20 nt, synthetic construct
  misc_feature 1..20: note = source = /note="Description of Artificial Sequence: Synthetic oligonucleotide"
  source 1..20: mol_type = other RNA
ttaacgaccttgggtcctcc

SEQ ID NO: 3316 - RNA, 20 nt, synthetic construct
  misc_feature 1..20: note = source = /note="Description of Artificial Sequence: Synthetic oligonucleotide"
  source 1..20: mol_type = other RNA
ctcttaacgaccttgggtcc

SEQ ID NO: 3317 - RNA, 20 nt, synthetic construct
  misc_feature 1..20: note = source = /note="Description of Artificial Sequence: Synthetic oligonucleotide"
  source 1..20: mol_type = other RNA
cgtctcttaacgaccttggg

SEQ ID NO: 3318 - RNA, 20 nt, synthetic construct
  misc_feature 1..20: note = source = /note="Description of Artificial Sequence: Synthetic oligonucleotide"
  source 1..20: mol_type = other RNA
tcggactccgtctcttaacg

SEQ ID NO: 3319 - RNA, 20 nt, synthetic construct
  misc_feature 1..20: note = source = /note="Description of Artificial Sequence: Synthetic oligonucleotide"
  source 1..20: mol_type = other RNA
gggtcgatgaggcttcggac

SEQ ID NO: 3320 - RNA, 20 nt, synthetic construct
  misc_feature 1..20: note = source = /note="Description of Artificial Sequence: Synthetic oligonucleotide"
  source 1..20: mol_type = other RNA
gtttttaatcggcccgcacc

SEQ ID NO: 3321 - RNA, 20 nt, synthetic construct
  misc_feature 1..20: note = source = /note="Description of Artificial Sequence: Synthetic oligonucleotide"
  source 1..20: mol_type = other RNA
tatgtttttaatcggcccgc

SEQ ID NO: 3322 - RNA, 20 nt, synthetic construct
  misc_feature 1..20: note = source = /note="Description of Artificial Sequence: Synthetic oligonucleotide"
  source 1..20: mol_type = other RNA
atttttatgtttttaatcgg

SEQ ID NO: 3323 - RNA, 20 nt, synthetic construct
  misc_feature 1..20: note = source = /note="Description of Artificial Sequence: Synthetic oligonucleotide"
  source 1..20: mol_type = other RNA
gatttttatgtttttaatcg

SEQ ID NO: 3324 - RNA, 20 nt, synthetic construct
  misc_feature 1..20: note = source = /note="Description of Artificial Sequence: Synthetic oligonucleotide"
  source 1..20: mol_type = other RNA
gttttggtcggactggttct

SEQ ID NO: 3325 - RNA, 20 nt, synthetic construct
  misc_feature 1..20: note = source = /note="Description of Artificial Sequence: Synthetic oligonucleotide"
  source 1..20: mol_type = other RNA
ccgctcacctagtggtccag

SEQ ID NO: 3326 - RNA, 20 nt, synthetic construct
  misc_feature 1..20: note = source = /note="Description of Artificial Sequence: Synthetic oligonucleotide"
  source 1..20: mol_type = other RNA
cgactccgctcacctagtgg

SEQ ID NO: 3327 - RNA, 20 nt, synthetic construct
  misc_feature 1..20: note = source = /note="Description of Artificial Sequence: Synthetic oligonucleotide"
  source 1..20: mol_type = other RNA
gaaaccctccgactccgctc

SEQ ID NO: 3328 - RNA, 20 nt, synthetic construct
  misc_feature 1..20: note = source = /note="Description of Artificial Sequence: Synthetic oligonucleotide"
  source 1..20: mol_type = other RNA
gggtcgtgaaaccctccgac

SEQ ID NO: 3329 - RNA, 20 nt, synthetic construct
  misc_feature 1..20: note = source = /note="Description of Artificial Sequence: Synthetic oligonucleotide"
  source 1..20: mol_type = other RNA
acattagggtcgtgaaaccc

SEQ ID NO: 3330 - RNA, 20 nt, synthetic construct
  misc_feature 1..20: note = source = /note="Description of Artificial Sequence: Synthetic oligonucleotide"
  source 1..20: mol_type = other RNA
tggacattagggtcgtgaaa

SEQ ID NO: 3331 - RNA, 20 nt, synthetic construct
  misc_feature 1..20: note = source = /note="Description of Artificial Sequence: Synthetic oligonucleotide"
  source 1..20: mol_type = other RNA
gtggacattagggtcgtgaa

SEQ ID NO: 3332 - RNA, 20 nt, synthetic construct
  misc_feature 1..20: note = source = /note="Description of Artificial Sequence: Synthetic oligonucleotide"
  source 1..20: mol_type = other RNA
ctatatgtgaataatagatt

SEQ ID NO: 3333 - RNA, 20 nt, synthetic construct
  misc_feature 1..20: note = source = /note="Description of Artificial Sequence: Synthetic oligonucleotide"
  source 1..20: mol_type = other RNA
gaacagctttagatgttaaa

SEQ ID NO: 3334 - RNA, 20 nt, synthetic construct
  misc_feature 1..20: note = source = /note="Description of Artificial Sequence: Synthetic oligonucleotide"
  source 1..20: mol_type = other RNA
agttaaataagtcactcttt

SEQ ID NO: 3335 - RNA, 20 nt, synthetic construct
  misc_feature 1..20: note = source = /note="Description of Artificial Sequence: Synthetic oligonucleotide"
  source 1..20: mol_type = other RNA
aatatcttttcatatccaga

SEQ ID NO: 3336 - RNA, 20 nt, synthetic construct
  misc_feature 1..20: note = source = /note="Description of Artificial Sequence: Synthetic oligonucleotide"
  source 1..20: mol_type = other RNA
agcttttactatttaggccg

SEQ ID NO: 3337 - RNA, 20 nt, synthetic construct
  misc_feature 1..20: note = source = /note="Description of Artificial Sequence: Synthetic oligonucleotide"
  source 1..20: mol_type = other RNA
cacccaagcttttactattt

SEQ ID NO: 3338 - RNA, 20 nt, synthetic construct
  misc_feature 1..20: note = source = /note="Description of Artificial Sequence: Synthetic oligonucleotide"
  source 1..20: mol_type = other RNA
gtaatggctctgctctgtgc

SEQ ID NO: 3339 - RNA, 20 nt, synthetic construct
  misc_feature 1..20: note = source = /note="Description of Artificial Sequence: Synthetic oligonucleotide"
  source 1..20: mol_type = other RNA
agctcgagagtgttcagtaa

SEQ ID NO: 3340 - RNA, 20 nt, synthetic construct
  misc_feature 1..20: note = source = /note="Description of Artificial Sequence: Synthetic oligonucleotide"
  source 1..20: mol_type = other RNA
ttaatattctaatataagat

SEQ ID NO: 3341 - RNA, 20 nt, synthetic construct
  misc_feature 1..20: note = source = /note="Description of Artificial Sequence: Synthetic oligonucleotide"
  source 1..20: mol_type = other RNA
aaacaaaggtccgagaaaga

SEQ ID NO: 3342 - RNA, 20 nt, synthetic construct
  misc_feature 1..20: note = source = /note="Description of Artificial Sequence: Synthetic oligonucleotide"
  source 1..20: mol_type = other RNA
gaaacaaaggtccgagaaag

SEQ ID NO: 3343 - RNA, 20 nt, synthetic construct
  misc_feature 1..20: note = source = /note="Description of Artificial Sequence: Synthetic oligonucleotide"
  source 1..20: mol_type = other RNA
tatgatttactgtgaaacaa

SEQ ID NO: 3344 - RNA, 20 nt, synthetic construct
  misc_feature 1..20: note = source = /note="Description of Artificial Sequence: Synthetic oligonucleotide"
  source 1..20: mol_type = other RNA
aaaatttccacattgctcct

SEQ ID NO: 3345 - RNA, 20 nt, synthetic construct
  misc_feature 1..20: note = source = /note="Description of Artificial Sequence: Synthetic oligonucleotide"
  source 1..20: mol_type = other RNA
tttaaccatttctaccaaag

SEQ ID NO: 3346 - RNA, 20 nt, synthetic construct
  misc_feature 1..20: note = source = /note="Description of Artificial Sequence: Synthetic oligonucleotide"
  source 1..20: mol_type = other RNA
tgtgcactttcaacatatta

SEQ ID NO: 3347 - RNA, 20 nt, synthetic construct
  misc_feature 1..20: note = source = /note="Description of Artificial Sequence: Synthetic oligonucleotide"
  source 1..20: mol_type = other RNA
ctgtgcactttcaacatatt

SEQ ID NO: 3348 - RNA, 20 nt, synthetic construct
  misc_feature 1..20: note = source = /note="Description of Artificial Sequence: Synthetic oligonucleotide"
  source 1..20: mol_type = other RNA
agtttatacaaaagacccca

SEQ ID NO: 3349 - RNA, 20 nt, synthetic construct
  misc_feature 1..20: note = source = /note="Description of Artificial Sequence: Synthetic oligonucleotide"
  source 1..20: mol_type = other RNA
gtgcctcagctgtcttctac

SEQ ID NO: 3350 - RNA, 20 nt, synthetic construct
  misc_feature 1..20: note = source = /note="Description of Artificial Sequence: Synthetic oligonucleotide"
  source 1..20: mol_type = other RNA
gtttgttttgtgtgtgtgtt

SEQ ID NO: 3351 - RNA, 20 nt, synthetic construct
  misc_feature 1..20: note = source = /note="Description of Artificial Sequence: Synthetic oligonucleotide"
  source 1..20: mol_type = other RNA
ggaaggcattagggtaacct

SEQ ID NO: 3352 - RNA, 20 nt, synthetic construct
  misc_feature 1..20: note = source = /note="Description of Artificial Sequence: Synthetic oligonucleotide"
  source 1..20: mol_type = other RNA
gggaaggcattagggtaacc

SEQ ID NO: 3353 - RNA, 20 nt, synthetic construct
  misc_feature 1..20: note = source = /note="Description of Artificial Sequence: Synthetic oligonucleotide"
  source 1..20: mol_type = other RNA
gaccatgtgggaaggcatta

SEQ ID NO: 3354 - RNA, 20 nt, synthetic construct
  misc_feature 1..20: note = source = /note="Description of Artificial Sequence: Synthetic oligonucleotide"
  source 1..20: mol_type = other RNA
tgaccatgtgggaaggcatt

SEQ ID NO: 3355 - RNA, 20 nt, synthetic construct
  misc_feature 1..20: note = source = /note="Description of Artificial Sequence: Synthetic oligonucleotide"
  source 1..20: mol_type = other RNA
atgtgtttgaccatgtggga

SEQ ID NO: 3356 - RNA, 20 nt, synthetic construct
  misc_feature 1..20: note = source = /note="Description of Artificial Sequence: Synthetic oligonucleotide"
  source 1..20: mol_type = other RNA
ctccatgtgtttgaccatgt

SEQ ID NO: 3357 - RNA, 20 nt, synthetic construct
  misc_feature 1..20: note = source = /note="Description of Artificial Sequence: Synthetic oligonucleotide"
  source 1..20: mol_type = other RNA
gctccatgtgtttgaccatg

SEQ ID NO: 3358 - RNA, 20 nt, synthetic construct
  misc_feature 1..20: note = source = /note="Description of Artificial Sequence: Synthetic oligonucleotide"
  source 1..20: mol_type = other RNA
aactgcaggcttcagaattc

SEQ ID NO: 3359 - RNA, 20 nt, synthetic construct
  misc_feature 1..20: note = source = /note="Description of Artificial Sequence: Synthetic oligonucleotide"
  source 1..20: mol_type = other RNA
tcccactgataaacaactgc

SEQ ID NO: 3360 - RNA, 20 nt, synthetic construct
  misc_feature 1..20: note = source = /note="Description of Artificial Sequence: Synthetic oligonucleotide"
  source 1..20: mol_type = other RNA
tgtatcagtattcatgatcc

SEQ ID NO: 3361 - RNA, 20 nt, synthetic construct
  misc_feature 1..20: note = source = /note="Description of Artificial Sequence: Synthetic oligonucleotide"
  source 1..20: mol_type = other RNA
accatgtttcccctgcagtc

SEQ ID NO: 3362 - RNA, 20 nt, synthetic construct
  misc_feature 1..20: note = source = /note="Description of Artificial Sequence: Synthetic oligonucleotide"
  source 1..20: mol_type = other RNA
ggcagggaaaagcctccttt

SEQ ID NO: 3363 - RNA, 20 nt, synthetic construct
  misc_feature 1..20: note = source = /note="Description of Artificial Sequence: Synthetic oligonucleotide"
  source 1..20: mol_type = other RNA
aaaataaacagtgtggggca

SEQ ID NO: 3364 - RNA, 20 nt, synthetic construct
  misc_feature 1..20: note = source = /note="Description of Artificial Sequence: Synthetic oligonucleotide"
  source 1..20: mol_type = other RNA
taaaataaacagtgtggggc

SEQ ID NO: 3365 - RNA, 20 nt, synthetic construct
  misc_feature 1..20: note = source = /note="Description of Artificial Sequence: Synthetic oligonucleotide"
  source 1..20: mol_type = other RNA
agtttaaaataaacagtgtg

SEQ ID NO: 3366 - RNA, 20 nt, synthetic construct
  misc_feature 1..20: note = source = /note="Description of Artificial Sequence: Synthetic oligonucleotide"
  source 1..20: mol_type = other RNA
tagtttaaaataaacagtgt

SEQ ID NO: 3367 - RNA, 20 nt, synthetic construct
  misc_feature 1..20: note = source = /note="Description of Artificial Sequence: Synthetic oligonucleotide"
  source 1..20: mol_type = other RNA
atagtttaaaataaacagtg

SEQ ID NO: 3368 - RNA, 20 nt, synthetic construct
  misc_feature 1..20: note = source = /note="Description of Artificial Sequence: Synthetic oligonucleotide"
  source 1..20: mol_type = other RNA
caaagtgaaaagctcctttc

SEQ ID NO: 3369 - RNA, 20 nt, synthetic construct
  misc_feature 1..20: note = source = /note="Description of Artificial Sequence: Synthetic oligonucleotide"
  source 1..20: mol_type = other RNA
aagtgcctacttgcttgtca

SEQ ID NO: 3370 - RNA, 20 nt, synthetic construct
  misc_feature 1..20: note = source = /note="Description of Artificial Sequence: Synthetic oligonucleotide"
  source 1..20: mol_type = other RNA
aaagtgcctacttgcttgtc

SEQ ID NO: 3371 - RNA, 20 nt, synthetic construct
  misc_feature 1..20: note = source = /note="Description of Artificial Sequence: Synthetic oligonucleotide"
  source 1..20: mol_type = other RNA
aaagagagtaacactcctca

SEQ ID NO: 3372 - RNA, 20 nt, synthetic construct
  misc_feature 1..20: note = source = /note="Description of Artificial Sequence: Synthetic oligonucleotide"
  source 1..20: mol_type = other RNA
gaaagagagtaacactcctc

SEQ ID NO: 3373 - RNA, 20 nt, synthetic construct
  misc_feature 1..20: note = source = /note="Description of Artificial Sequence: Synthetic oligonucleotide"
  source 1..20: mol_type = other RNA
taaaagagtttgagtcagct

SEQ ID NO: 3374 - RNA, 20 nt, synthetic construct
  misc_feature 1..20: note = source = /note="Description of Artificial Sequence: Synthetic oligonucleotide"
  source 1..20: mol_type = other RNA
tgcagcaacattattagaga

SEQ ID NO: 3375 - RNA, 20 nt, synthetic construct
  misc_feature 1..20: note = source = /note="Description of Artificial Sequence: Synthetic oligonucleotide"
  source 1..20: mol_type = other RNA
tgctccaactgtttctatga

SEQ ID NO: 3376 - RNA, 20 nt, synthetic construct
  misc_feature 1..20: note = source = /note="Description of Artificial Sequence: Synthetic oligonucleotide"
  source 1..20: mol_type = other RNA
atttctatatgtaataggaa

SEQ ID NO: 3377 - RNA, 20 nt, synthetic construct
  misc_feature 1..20: note = source = /note="Description of Artificial Sequence: Synthetic oligonucleotide"
  source 1..20: mol_type = other RNA
gaagtatttctatatgtaat

SEQ ID NO: 3378 - RNA, 20 nt, synthetic construct
  misc_feature 1..20: note = source = /note="Description of Artificial Sequence: Synthetic oligonucleotide"
  source 1..20: mol_type = other RNA
tctatacaaacagtgatttt

SEQ ID NO: 3379 - RNA, 20 nt, synthetic construct
  misc_feature 1..20: note = source = /note="Description of Artificial Sequence: Synthetic oligonucleotide"
  source 1..20: mol_type = other RNA
ttctatacaaacagtgattt

SEQ ID NO: 3380 - RNA, 20 nt, synthetic construct
  misc_feature 1..20: note = source = /note="Description of Artificial Sequence: Synthetic oligonucleotide"
  source 1..20: mol_type = other RNA
ccccgtattattgcagatat

SEQ ID NO: 3381 - RNA, 20 nt, synthetic construct
  misc_feature 1..20: note = source = /note="Description of Artificial Sequence: Synthetic oligonucleotide"
  source 1..20: mol_type = other RNA
attaatctatcacacaaaag

SEQ ID NO: 3382 - RNA, 20 nt, synthetic construct
  misc_feature 1..20: note = source = /note="Description of Artificial Sequence: Synthetic oligonucleotide"
  source 1..20: mol_type = other RNA
cattaatctatcacacaaaa

SEQ ID NO: 3383 - RNA, 20 nt, synthetic construct
  misc_feature 1..20: note = source = /note="Description of Artificial Sequence: Synthetic oligonucleotide"
  source 1..20: mol_type = other RNA
tcattaatctatcacacaaa

SEQ ID NO: 3384 - RNA, 20 nt, synthetic construct
  misc_feature 1..20: note = source = /note="Description of Artificial Sequence: Synthetic oligonucleotide"
  source 1..20: mol_type = other RNA
tccatgctaagcacagctgc

SEQ ID NO: 3385 - RNA, 20 nt, synthetic construct
  misc_feature 1..20: note = source = /note="Description of Artificial Sequence: Synthetic oligonucleotide"
  source 1..20: mol_type = other RNA
cttttttttctcatcctttt

SEQ ID NO: 3386 - RNA, 20 nt, synthetic construct
  misc_feature 1..20: note = source = /note="Description of Artificial Sequence: Synthetic oligonucleotide"
  source 1..20: mol_type = other RNA
tctgataatttgttacaagt

SEQ ID NO: 3387 - RNA, 20 nt, synthetic construct
  misc_feature 1..20: note = source = /note="Description of Artificial Sequence: Synthetic oligonucleotide"
  source 1..20: mol_type = other RNA
aaagatgaaaagctcaaaaa

SEQ ID NO: 3388 - RNA, 20 nt, synthetic construct
  misc_feature 1..20: note = source = /note="Description of Artificial Sequence: Synthetic oligonucleotide"
  source 1..20: mol_type = other RNA
agaattaaatctataattca

SEQ ID NO: 3389 - RNA, 20 nt, synthetic construct
  misc_feature 1..20: note = source = /note="Description of Artificial Sequence: Synthetic oligonucleotide"
  source 1..20: mol_type = other RNA
cagaattaaatctataattc

SEQ ID NO: 3390 - RNA, 20 nt, synthetic construct
  misc_feature 1..20: note = source = /note="Description of Artificial Sequence: Synthetic oligonucleotide"
  source 1..20: mol_type = other RNA
gaaagtggtggcaatccagg

SEQ ID NO: 3391 - RNA, 20 nt, synthetic construct
  misc_feature 1..20: note = source = /note="Description of Artificial Sequence: Synthetic oligonucleotide"
  source 1..20: mol_type = other RNA
agtgaaagtggtggcaatcc

SEQ ID NO: 3392 - RNA, 20 nt, synthetic construct
  misc_feature 1..20: note = source = /note="Description of Artificial Sequence: Synthetic oligonucleotide"
  source 1..20: mol_type = other RNA
aaatactggagtgaaagtgg

SEQ ID NO: 3393 - RNA, 20 nt, synthetic construct
  misc_feature 1..20: note = source = /note="Description of Artificial Sequence: Synthetic oligonucleotide"
  source 1..20: mol_type = other RNA
ttgaaatactggagtgaaag

SEQ ID NO: 3394 - RNA, 20 nt, synthetic construct
  misc_feature 1..20: note = source = /note="Description of Artificial Sequence: Synthetic oligonucleotide"
  source 1..20: mol_type = other RNA
tgaagtgtttattgaaatac

SEQ ID NO: 3395 - RNA, 20 nt, synthetic construct
  misc_feature 1..20: note = source = /note="Description of Artificial Sequence: Synthetic oligonucleotide"
  source 1..20: mol_type = other RNA
tagacatttacgttccttac

SEQ ID NO: 3396 - RNA, 20 nt, synthetic construct
  misc_feature 1..20: note = source = /note="Description of Artificial Sequence: Synthetic oligonucleotide"
  source 1..20: mol_type = other RNA
gtagacatttacgttcctta

SEQ ID NO: 3397 - RNA, 20 nt, synthetic construct
  misc_feature 1..20: note = source = /note="Description of Artificial Sequence: Synthetic oligonucleotide"
  source 1..20: mol_type = other RNA
agtagacatttacgttcctt

SEQ ID NO: 3398 - RNA, 20 nt, synthetic construct
  misc_feature 1..20: note = source = /note="Description of Artificial Sequence: Synthetic oligonucleotide"
  source 1..20: mol_type = other RNA
aaaagagtagacatttacgt

SEQ ID NO: 3399 - RNA, 20 nt, synthetic construct
  misc_feature 1..20: note = source = /note="Description of Artificial Sequence: Synthetic oligonucleotide"
  source 1..20: mol_type = other RNA
aatcgaacaatgcgataaac

SEQ ID NO: 3400 - RNA, 20 nt, synthetic construct
  misc_feature 1..20: note = source = /note="Description of Artificial Sequence: Synthetic oligonucleotide"
  source 1..20: mol_type = other RNA
agaaacctttcacgaatcgt

SEQ ID NO: 3401 - RNA, 20 nt, synthetic construct
  misc_feature 1..20: note = source = /note="Description of Artificial Sequence: Synthetic oligonucleotide"
  source 1..20: mol_type = other RNA
gtattcttaatctattagaa

SEQ ID NO: 3402 - RNA, 20 nt, synthetic construct
  misc_feature 1..20: note = source = /note="Description of Artificial Sequence: Synthetic oligonucleotide"
  source 1..20: mol_type = other RNA
caaagaaggaatcatttcac

SEQ ID NO: 3403 - RNA, 20 nt, synthetic construct
  misc_feature 1..20: note = source = /note="Description of Artificial Sequence: Synthetic oligonucleotide"
  source 1..20: mol_type = other RNA
tcaataaattggggtacaga

SEQ ID NO: 3404 - RNA, 20 nt, synthetic construct
  misc_feature 1..20: note = source = /note="Description of Artificial Sequence: Synthetic oligonucleotide"
  source 1..20: mol_type = other RNA
aagataattcaaaatttaat

SEQ ID NO: 3405 - RNA, 20 nt, synthetic construct
  misc_feature 1..20: note = source = /note="Description of Artificial Sequence: Synthetic oligonucleotide"
  source 1..20: mol_type = other RNA
aaagataattcaaaatttaa

SEQ ID NO: 3406 - RNA, 20 nt, synthetic construct
  misc_feature 1..20: note = source = /note="Description of Artificial Sequence: Synthetic oligonucleotide"
  source 1..20: mol_type = other RNA
acaatggagatttgcaaata

SEQ ID NO: 3407 - RNA, 20 nt, synthetic construct
  misc_feature 1..20: note = source = /note="Description of Artificial Sequence: Synthetic oligonucleotide"
  source 1..20: mol_type = other RNA
gacaatggagatttgcaaat

SEQ ID NO: 3408 - RNA, 20 nt, synthetic construct
  misc_feature 1..20: note = source = /note="Description of Artificial Sequence: Synthetic oligonucleotide"
  source 1..20: mol_type = other RNA
gattacgaacaaagagacaa

SEQ ID NO: 3409 - RNA, 20 nt, synthetic construct
  misc_feature 1..20: note = source = /note="Description of Artificial Sequence: Synthetic oligonucleotide"
  source 1..20: mol_type = other RNA
ccaaacaccagactgcttgt

SEQ ID NO: 3410 - RNA, 20 nt, synthetic construct
  misc_feature 1..20: note = source = /note="Description of Artificial Sequence: Synthetic oligonucleotide"
  source 1..20: mol_type = other RNA
gttaatatggagttgtttcg

SEQ ID NO: 3411 - RNA, 20 nt, synthetic construct
  misc_feature 1..20: note = source = /note="Description of Artificial Sequence: Synthetic oligonucleotide"
  source 1..20: mol_type = other RNA
gaatttacacatgtcaaaac

SEQ ID NO: 3412 - RNA, 20 nt, synthetic construct
  misc_feature 1..20: note = source = /note="Description of Artificial Sequence: Synthetic oligonucleotide"
  source 1..20: mol_type = other RNA
ttttttactgactctccact

SEQ ID NO: 3413 - RNA, 20 nt, synthetic construct
  misc_feature 1..20: note = source = /note="Description of Artificial Sequence: Synthetic oligonucleotide"
  source 1..20: mol_type = other RNA
tttgtgttttttactgactc

SEQ ID NO: 3414 - RNA, 20 nt, synthetic construct
  misc_feature 1..20: note = source = /note="Description of Artificial Sequence: Synthetic oligonucleotide"
  source 1..20: mol_type = other RNA
actgatgtcaatcatgacat

SEQ ID NO: 3415 - RNA, 20 nt, synthetic construct
  misc_feature 1..20: note = source = /note="Description of Artificial Sequence: Synthetic oligonucleotide"
  source 1..20: mol_type = other RNA
acctctagattacatgtcgt

SEQ ID NO: 3416 - RNA, 20 nt, synthetic construct
  misc_feature 1..20: note = source = /note="Description of Artificial Sequence: Synthetic oligonucleotide"
  source 1..20: mol_type = other RNA
ctacttataaattatgtaag

SEQ ID NO: 3417 - RNA, 20 nt, synthetic construct
  misc_feature 1..20: note = source = /note="Description of Artificial Sequence: Synthetic oligonucleotide"
  source 1..20: mol_type = other RNA
tcccctttatccaaacagtt

SEQ ID NO: 3418 - RNA, 20 nt, synthetic construct
  misc_feature 1..20: note = source = /note="Description of Artificial Sequence: Synthetic oligonucleotide"
  source 1..20: mol_type = other RNA
ccgacccatcatccccttta

SEQ ID NO: 3419 - RNA, 20 nt, synthetic construct
  misc_feature 1..20: note = source = /note="Description of Artificial Sequence: Synthetic oligonucleotide"
  source 1..20: mol_type = other RNA
acggtacccgacccatcatc

SEQ ID NO: 3420 - RNA, 20 nt, synthetic construct
  misc_feature 1..20: note = source = /note="Description of Artificial Sequence: Synthetic oligonucleotide"
  source 1..20: mol_type = other RNA
aacggtacccgacccatcat

SEQ ID NO: 3421 - RNA, 20 nt, synthetic construct
  misc_feature 1..20: note = source = /note="Description of Artificial Sequence: Synthetic oligonucleotide"
  source 1..20: mol_type = other RNA
caacggtacccgacccatca

SEQ ID NO: 3422 - RNA, 20 nt, synthetic construct
  misc_feature 1..20: note = source = /note="Description of Artificial Sequence: Synthetic oligonucleotide"
  source 1..20: mol_type = other RNA
gtaccaccaacggtacccga

SEQ ID NO: 3423 - RNA, 20 nt, synthetic construct
  misc_feature 1..20: note = source = /note="Description of Artificial Sequence: Synthetic oligonucleotide"
  source 1..20: mol_type = other RNA
tgtaccaccaacggtacccg

SEQ ID NO: 3424 - RNA, 20 nt, synthetic construct
  misc_feature 1..20: note = source = /note="Description of Artificial Sequence: Synthetic oligonucleotide"
  source 1..20: mol_type = other RNA
tcattgtaccaccaacggta

SEQ ID NO: 3425 - RNA, 20 nt, synthetic construct
  misc_feature 1..20: note = source = /note="Description of Artificial Sequence: Synthetic oligonucleotide"
  source 1..20: mol_type = other RNA
ctcattgtaccaccaacggt

SEQ ID NO: 3426 - RNA, 20 nt, synthetic construct
  misc_feature 1..20: note = source = /note="Description of Artificial Sequence: Synthetic oligonucleotide"
  source 1..20: mol_type = other RNA
tttgcgtctctcattgtacc

SEQ ID NO: 3427 - RNA, 20 nt, synthetic construct
  misc_feature 1..20: note = source = /note="Description of Artificial Sequence: Synthetic oligonucleotide"
  source 1..20: mol_type = other RNA
gtatttgcgtctctcattgt

SEQ ID NO: 3428 - RNA, 20 nt, synthetic construct
  misc_feature 1..20: note = source = /note="Description of Artificial Sequence: Synthetic oligonucleotide"
  source 1..20: mol_type = other RNA
acgtactagagtgaatatac

SEQ ID NO: 3429 - RNA, 20 nt, synthetic construct
  misc_feature 1..20: note = source = /note="Description of Artificial Sequence: Synthetic oligonucleotide"
  source 1..20: mol_type = other RNA
tcgattatttttcctttcag

SEQ ID NO: 3430 - RNA, 20 nt, synthetic construct
  misc_feature 1..20: note = source = /note="Description of Artificial Sequence: Synthetic oligonucleotide"
  source 1..20: mol_type = other RNA
ctgtatgtgtcgattatttt

SEQ ID NO: 3431 - RNA, 20 nt, synthetic construct
  misc_feature 1..20: note = source = /note="Description of Artificial Sequence: Synthetic oligonucleotide"
  source 1..20: mol_type = other RNA
ttcgtctaagtgtttacgat

SEQ ID NO: 3432 - RNA, 20 nt, synthetic construct
  misc_feature 1..20: note = source = /note="Description of Artificial Sequence: Synthetic oligonucleotide"
  source 1..20: mol_type = other RNA
taatcaacaagagtaaaatg

SEQ ID NO: 3433 - RNA, 20 nt, synthetic construct
  misc_feature 1..20: note = source = /note="Description of Artificial Sequence: Synthetic oligonucleotide"
  source 1..20: mol_type = other RNA
ttaaaacggttcattgtacg

SEQ ID NO: 3434 - RNA, 20 nt, synthetic construct
  misc_feature 1..20: note = source = /note="Description of Artificial Sequence: Synthetic oligonucleotide"
  source 1..20: mol_type = other RNA
ttccagaagggtaaagatga

SEQ ID NO: 3435 - RNA, 20 nt, synthetic construct
  misc_feature 1..20: note = source = /note="Description of Artificial Sequence: Synthetic oligonucleotide"
  source 1..20: mol_type = other RNA
tgagcctgtatattccagaa

SEQ ID NO: 3436 - RNA, 20 nt, synthetic construct
  misc_feature 1..20: note = source = /note="Description of Artificial Sequence: Synthetic oligonucleotide"
  source 1..20: mol_type = other RNA
atgagcctgtatattccaga

SEQ ID NO: 3437 - RNA, 20 nt, synthetic construct
  misc_feature 1..20: note = source = /note="Description of Artificial Sequence: Synthetic oligonucleotide"
  source 1..20: mol_type = other RNA
cgtctccgaccttcgtagga

SEQ ID NO: 3438 - RNA, 20 nt, synthetic construct
  misc_feature 1..20: note = source = /note="Description of Artificial Sequence: Synthetic oligonucleotide"
  source 1..20: mol_type = other RNA
tcgtctccgaccttcgtagg

SEQ ID NO: 3439 - RNA, 20 nt, synthetic construct
  misc_feature 1..20: note = source = /note="Description of Artificial Sequence: Synthetic oligonucleotide"
  source 1..20: mol_type = other RNA
gtgtggaaaactcgtctccg

SEQ ID NO: 3440 - RNA, 20 nt, synthetic construct
  misc_feature 1..20: note = source = /note="Description of Artificial Sequence: Synthetic oligonucleotide"
  source 1..20: mol_type = other RNA
ttaagtgtggaaaactcgtc

SEQ ID NO: 3441 - RNA, 20 nt, synthetic construct
  misc_feature 1..20: note = source = /note="Description of Artificial Sequence: Synthetic oligonucleotide"
  source 1..20: mol_type = other RNA
accgcggataagtccgttga

SEQ ID NO: 3442 - RNA, 20 nt, synthetic construct
  misc_feature 1..20: note = source = /note="Description of Artificial Sequence: Synthetic oligonucleotide"
  source 1..20: mol_type = other RNA
gaccgcggataagtccgttg

SEQ ID NO: 3443 - RNA, 20 nt, synthetic construct
  misc_feature 1..20: note = source = /note="Description of Artificial Sequence: Synthetic oligonucleotide"
  source 1..20: mol_type = other RNA
cggttgagaccgcggataag

SEQ ID NO: 3444 - RNA, 20 nt, synthetic construct
  misc_feature 1..20: note = source = /note="Description of Artificial Sequence: Synthetic oligonucleotide"
  source 1..20: mol_type = other RNA
actctttcgatacggttgag

SEQ ID NO: 3445 - RNA, 20 nt, synthetic construct
  misc_feature 1..20: note = source = /note="Description of Artificial Sequence: Synthetic oligonucleotide"
  source 1..20: mol_type = other RNA
tgaacacgttagagggacag

SEQ ID NO: 3446 - RNA, 20 nt, synthetic construct
  misc_feature 1..20: note = source = /note="Description of Artificial Sequence: Synthetic oligonucleotide"
  source 1..20: mol_type = other RNA
ggggaactcggttagaagtc

SEQ ID NO: 3447 - RNA, 20 nt, synthetic construct
  misc_feature 1..20: note = source = /note="Description of Artificial Sequence: Synthetic oligonucleotide"
  source 1..20: mol_type = other RNA
ctaactttgttattttccct

SEQ ID NO: 3448 - RNA, 20 nt, synthetic construct
  misc_feature 1..20: note = source = /note="Description of Artificial Sequence: Synthetic oligonucleotide"
  source 1..20: mol_type = other RNA
agaactaactttgttatttt

SEQ ID NO: 3449 - RNA, 20 nt, synthetic construct
  misc_feature 1..20: note = source = /note="Description of Artificial Sequence: Synthetic oligonucleotide"
  source 1..20: mol_type = other RNA
tagaactaactttgttattt

SEQ ID NO: 3450 - RNA, 20 nt, synthetic construct
  misc_feature 1..20: note = source = /note="Description of Artificial Sequence: Synthetic oligonucleotide"
  source 1..20: mol_type = other RNA
tttcctactagtactttcct

SEQ ID NO: 3451 - RNA, 20 nt, synthetic construct
  misc_feature 1..20: note = source = /note="Description of Artificial Sequence: Synthetic oligonucleotide"
  source 1..20: mol_type = other RNA
gttatttcctactagtactt

SEQ ID NO: 3452 - RNA, 20 nt, synthetic construct
  misc_feature 1..20: note = source = /note="Description of Artificial Sequence: Synthetic oligonucleotide"
  source 1..20: mol_type = other RNA
catagattatttctgttatt

SEQ ID NO: 3453 - RNA, 20 nt, synthetic construct
  misc_feature 1..20: note = source = /note="Description of Artificial Sequence: Synthetic oligonucleotide"
  source 1..20: mol_type = other RNA
cgatagtaaattataaagat

SEQ ID NO: 3454 - RNA, 20 nt, synthetic construct
  misc_feature 1..20: note = source = /note="Description of Artificial Sequence: Synthetic oligonucleotide"
  source 1..20: mol_type = other RNA
cttttatactatgttttatc

SEQ ID NO: 3455 - RNA, 20 nt, synthetic construct
  misc_feature 1..20: note = source = /note="Description of Artificial Sequence: Synthetic oligonucleotide"
  source 1..20: mol_type = other RNA
gatagtagatagaaattcgt

SEQ ID NO: 3456 - RNA, 20 nt, synthetic construct
  misc_feature 1..20: note = source = /note="Description of Artificial Sequence: Synthetic oligonucleotide"
  source 1..20: mol_type = other RNA
gtccagactcggtggtgtgg

SEQ ID NO: 3457 - RNA, 20 nt, synthetic construct
  misc_feature 1..20: note = source = /note="Description of Artificial Sequence: Synthetic oligonucleotide"
  source 1..20: mol_type = other RNA
agggtttcacgaccttaatg

SEQ ID NO: 3458 - RNA, 20 nt, synthetic construct
  misc_feature 1..20: note = source = /note="Description of Artificial Sequence: Synthetic oligonucleotide"
  source 1..20: mol_type = other RNA
cggagccggagggtttcacg

SEQ ID NO: 3459 - RNA, 20 nt, synthetic construct
  misc_feature 1..20: note = source = /note="Description of Artificial Sequence: Synthetic oligonucleotide"
  source 1..20: mol_type = other RNA
gagtccactagacgggcgga

SEQ ID NO: 3460 - RNA, 20 nt, synthetic construct
  misc_feature 1..20: note = source = /note="Description of Artificial Sequence: Synthetic oligonucleotide"
  source 1..20: mol_type = other RNA
ccaaagtttgaggactggag

SEQ ID NO: 3461 - RNA, 20 nt, synthetic construct
  misc_feature 1..20: note = source = /note="Description of Artificial Sequence: Synthetic oligonucleotide"
  source 1..20: mol_type = other RNA
aaagagatgcaaccggtcca

SEQ ID NO: 3462 - RNA, 20 nt, synthetic construct
  misc_feature 1..20: note = source = /note="Description of Artificial Sequence: Synthetic oligonucleotide"
  source 1..20: mol_type = other RNA
ccccaaagagatgcaaccgg

SEQ ID NO: 3463 - RNA, 20 nt, synthetic construct
  misc_feature 1..20: note = source = /note="Description of Artificial Sequence: Synthetic oligonucleotide"
  source 1..20: mol_type = other RNA
gtctgccccaaagagatgca

SEQ ID NO: 3464 - RNA, 20 nt, synthetic construct
  misc_feature 1..20: note = source = /note="Description of Artificial Sequence: Synthetic oligonucleotide"
  source 1..20: mol_type = other RNA
acataaaaaaccatgtctgc

SEQ ID NO: 3465 - RNA, 20 nt, synthetic construct
  misc_feature 1..20: note = source = /note="Description of Artificial Sequence: Synthetic oligonucleotide"
  source 1..20: mol_type = other RNA
aacataaaaaaccatgtctg

SEQ ID NO: 3466 - RNA, 20 nt, synthetic construct
  misc_feature 1..20: note = source = /note="Description of Artificial Sequence: Synthetic oligonucleotide"
  source 1..20: mol_type = other RNA
aaacataaaaaaccatgtct

SEQ ID NO: 3467 - RNA, 20 nt, synthetic construct
  misc_feature 1..20: note = source = /note="Description of Artificial Sequence: Synthetic oligonucleotide"
  source 1..20: mol_type = other RNA
accgattaaaaacataaaaa

SEQ ID NO: 3468 - RNA, 20 nt, synthetic construct
  misc_feature 1..20: note = source = /note="Description of Artificial Sequence: Synthetic oligonucleotide"
  source 1..20: mol_type = other RNA
gtccgcgggtggtggtgcgg

SEQ ID NO: 3469 - RNA, 20 nt, synthetic construct
  misc_feature 1..20: note = source = /note="Description of Artificial Sequence: Synthetic oligonucleotide"
  source 1..20: mol_type = other RNA
aggactcaccgaccttaatg

SEQ ID NO: 3470 - RNA, 20 nt, synthetic construct
  misc_feature 1..20: note = source = /note="Description of Artificial Sequence: Synthetic oligonucleotide"
  source 1..20: mol_type = other RNA
cggagtcagaggactcaccg

SEQ ID NO: 3471 - RNA, 20 nt, synthetic construct
  misc_feature 1..20: note = source = /note="Description of Artificial Sequence: Synthetic oligonucleotide"
  source 1..20: mol_type = other RNA
agcacggagtcagaggactc

SEQ ID NO: 3472 - RNA, 20 nt, synthetic construct
  misc_feature 1..20: note = source = /note="Description of Artificial Sequence: Synthetic oligonucleotide"
  source 1..20: mol_type = other RNA
gtgacgttggagacggagga

SEQ ID NO: 3473 - RNA, 20 nt, synthetic construct
  misc_feature 1..20: note = source = /note="Description of Artificial Sequence: Synthetic oligonucleotide"
  source 1..20: mol_type = other RNA
agtgacgttggagacggagg

SEQ ID NO: 3474 - RNA, 20 nt, synthetic construct
  misc_feature 1..20: note = source = /note="Description of Artificial Sequence: Synthetic oligonucleotide"
  source 1..20: mol_type = other RNA
agtgggtccgacctcacgtt

SEQ ID NO: 3475 - RNA, 20 nt, synthetic construct
  misc_feature 1..20: note = source = /note="Description of Artificial Sequence: Synthetic oligonucleotide"
  source 1..20: mol_type = other RNA
agagggagacagtgggtccg

SEQ ID NO: 3476 - RNA, 20 nt, synthetic construct
  misc_feature 1..20: note = source = /note="Description of Artificial Sequence: Synthetic oligonucleotide"
  source 1..20: mol_type = other RNA
cttcagagggagacagtggg

SEQ ID NO: 3477 - RNA, 20 nt, synthetic construct
  misc_feature 1..20: note = source = /note="Description of Artificial Sequence: Synthetic oligonucleotide"
  source 1..20: mol_type = other RNA
taaaaaataaaaataaaaaa

SEQ ID NO: 3478 - RNA, 20 nt, synthetic construct
  misc_feature 1..20: note = source = /note="Description of Artificial Sequence: Synthetic oligonucleotide"
  source 1..20: mol_type = other RNA
ataaaaaataaaaataaaaa

SEQ ID NO: 3479 - RNA, 20 nt, synthetic construct
  misc_feature 1..20: note = source = /note="Description of Artificial Sequence: Synthetic oligonucleotide"
  source 1..20: mol_type = other RNA
attccttaaaggtgagagtg

SEQ ID NO: 3480 - RNA, 20 nt, synthetic construct
  misc_feature 1..20: note = source = /note="Description of Artificial Sequence: Synthetic oligonucleotide"
  source 1..20: mol_type = other RNA
aaagtactgtgacggtacat

SEQ ID NO: 3481 - RNA, 20 nt, synthetic construct
  misc_feature 1..20: note = source = /note="Description of Artificial Sequence: Synthetic oligonucleotide"
  source 1..20: mol_type = other RNA
gagtttttgtagaaagtgta

SEQ ID NO: 3482 - RNA, 20 nt, synthetic construct
  misc_feature 1..20: note = source = /note="Description of Artificial Sequence: Synthetic oligonucleotide"
  source 1..20: mol_type = other RNA
tgagtttttgtagaaagtgt

SEQ ID NO: 3483 - RNA, 20 nt, synthetic construct
  misc_feature 1..20: note = source = /note="Description of Artificial Sequence: Synthetic oligonucleotide"
  source 1..20: mol_type = other RNA
gcttgcgtgataattgttgt

SEQ ID NO: 3484 - RNA, 20 nt, synthetic construct
  misc_feature 1..20: note = source = /note="Description of Artificial Sequence: Synthetic oligonucleotide"
  source 1..20: mol_type = other RNA
tgcttgcgtgataattgttg

SEQ ID NO: 3485 - RNA, 20 nt, synthetic construct
  misc_feature 1..20: note = source = /note="Description of Artificial Sequence: Synthetic oligonucleotide"
  source 1..20: mol_type = other RNA
tcatcagtaagtgttattga

SEQ ID NO: 3486 - RNA, 20 nt, synthetic construct
  misc_feature 1..20: note = source = /note="Description of Artificial Sequence: Synthetic oligonucleotide"
  source 1..20: mol_type = other RNA
atcatcagtaagtgttattg

SEQ ID NO: 3487 - RNA, 20 nt, synthetic construct
  misc_feature 1..20: note = source = /note="Description of Artificial Sequence: Synthetic oligonucleotide"
  source 1..20: mol_type = other RNA
agagtatcccaacttataca

SEQ ID NO: 3488 - RNA, 20 nt, synthetic construct
  misc_feature 1..20: note = source = /note="Description of Artificial Sequence: Synthetic oligonucleotide"
  source 1..20: mol_type = other RNA
ccctaaatgcagacttagaa

SEQ ID NO: 3489 - RNA, 20 nt, synthetic construct
  misc_feature 1..20: note = source = /note="Description of Artificial Sequence: Synthetic oligonucleotide"
  source 1..20: mol_type = other RNA
tacattttgaaaagtcactg

SEQ ID NO: 3490 - RNA, 20 nt, synthetic construct
  misc_feature 1..20: note = source = /note="Description of Artificial Sequence: Synthetic oligonucleotide"
  source 1..20: mol_type = other RNA
attgtgggtaagaataataa

SEQ ID NO: 3491 - RNA, 20 nt, synthetic construct
  misc_feature 1..20: note = source = /note="Description of Artificial Sequence: Synthetic oligonucleotide"
  source 1..20: mol_type = other RNA
ttaaagcaatgcattattgt

SEQ ID NO: 3492 - RNA, 20 nt, synthetic construct
  misc_feature 1..20: note = source = /note="Description of Artificial Sequence: Synthetic oligonucleotide"
  source 1..20: mol_type = other RNA
tttaaagcaatgcattattg

SEQ ID NO: 3493 - RNA, 20 nt, synthetic construct
  misc_feature 1..20: note = source = /note="Description of Artificial Sequence: Synthetic oligonucleotide"
  source 1..20: mol_type = other RNA
tcatctctgagtctttccat

SEQ ID NO: 3494 - RNA, 20 nt, synthetic construct
  misc_feature 1..20: note = source = /note="Description of Artificial Sequence: Synthetic oligonucleotide"
  source 1..20: mol_type = other RNA
atgtatcatctctgagtctt

SEQ ID NO: 3495 - RNA, 20 nt, synthetic construct
  misc_feature 1..20: note = source = /note="Description of Artificial Sequence: Synthetic oligonucleotide"
  source 1..20: mol_type = other RNA
ccgtccttttcttttcatcg

SEQ ID NO: 3496 - RNA, 20 nt, synthetic construct
  misc_feature 1..20: note = source = /note="Description of Artificial Sequence: Synthetic oligonucleotide"
  source 1..20: mol_type = other RNA
atgtcctcaactgtcttccg

SEQ ID NO: 3497 - RNA, 20 nt, synthetic construct
  misc_feature 1..20: note = source = /note="Description of Artificial Sequence: Synthetic oligonucleotide"
  source 1..20: mol_type = other RNA
ccttatgtcctcaactgtct

SEQ ID NO: 3498 - RNA, 20 nt, synthetic construct
  misc_feature 1..20: note = source = /note="Description of Artificial Sequence: Synthetic oligonucleotide"
  source 1..20: mol_type = other RNA
cttcattactataccttatg

SEQ ID NO: 3499 - RNA, 20 nt, synthetic construct
  misc_feature 1..20: note = source = /note="Description of Artificial Sequence: Synthetic oligonucleotide"
  source 1..20: mol_type = other RNA
tcgttattcttcattactat

SEQ ID NO: 3500 - RNA, 20 nt, synthetic construct
  misc_feature 1..20: note = source = /note="Description of Artificial Sequence: Synthetic oligonucleotide"
  source 1..20: mol_type = other RNA
ttaaaataaataatgttagt

SEQ ID NO: 3501 - RNA, 20 nt, synthetic construct
  misc_feature 1..20: note = source = /note="Description of Artificial Sequence: Synthetic oligonucleotide"
  source 1..20: mol_type = other RNA
tgtacaagttggtatgacga

SEQ ID NO: 3502 - RNA, 20 nt, synthetic construct
  misc_feature 1..20: note = source = /note="Description of Artificial Sequence: Synthetic oligonucleotide"
  source 1..20: mol_type = other RNA
ttcgatttaaaatcacagtg

SEQ ID NO: 3503 - RNA, 20 nt, synthetic construct
  misc_feature 1..20: note = source = /note="Description of Artificial Sequence: Synthetic oligonucleotide"
  source 1..20: mol_type = other RNA
actgtttcttaaatcgtttt

SEQ ID NO: 3504 - RNA, 20 nt, synthetic construct
  misc_feature 1..20: note = source = /note="Description of Artificial Sequence: Synthetic oligonucleotide"
  source 1..20: mol_type = other RNA
aactgtttcttaaatcgttt

SEQ ID NO: 3505 - RNA, 20 nt, synthetic construct
  misc_feature 1..20: note = source = /note="Description of Artificial Sequence: Synthetic oligonucleotide"
  source 1..20: mol_type = other RNA
aaaaatgtggcataattttg

SEQ ID NO: 3506 - RNA, 20 nt, synthetic construct
  misc_feature 1..20: note = source = /note="Description of Artificial Sequence: Synthetic oligonucleotide"
  source 1..20: mol_type = other RNA
atgtgaaagaaacaaaaatg

SEQ ID NO: 3507 - RNA, 20 nt, synthetic construct
  misc_feature 1..20: note = source = /note="Description of Artificial Sequence: Synthetic oligonucleotide"
  source 1..20: mol_type = other RNA
aagaaaaattgaatgcttac

SEQ ID NO: 3508 - RNA, 20 nt, synthetic construct
  misc_feature 1..20: note = source = /note="Description of Artificial Sequence: Synthetic oligonucleotide"
  source 1..20: mol_type = other RNA
agtgtatttcattcatcaaa

SEQ ID NO: 3509 - RNA, 20 nt, synthetic construct
  misc_feature 1..20: note = source = /note="Description of Artificial Sequence: Synthetic oligonucleotide"
  source 1..20: mol_type = other RNA
aagcaataatagacatagcc

SEQ ID NO: 3510 - RNA, 20 nt, synthetic construct
  misc_feature 1..20: note = source = /note="Description of Artificial Sequence: Synthetic oligonucleotide"
  source 1..20: mol_type = other RNA
tcctttttatattccgtaaa

SEQ ID NO: 3511 - RNA, 20 nt, synthetic construct
  misc_feature 1..20: note = source = /note="Description of Artificial Sequence: Synthetic oligonucleotide"
  source 1..20: mol_type = other RNA
catgatattcctttttatat

SEQ ID NO: 3512 - RNA, 20 nt, synthetic construct
  misc_feature 1..20: note = source = /note="Description of Artificial Sequence: Synthetic oligonucleotide"
  source 1..20: mol_type = other RNA
attaaatacttacatgatat

SEQ ID NO: 3513 - RNA, 20 nt, synthetic construct
  misc_feature 1..20: note = source = /note="Description of Artificial Sequence: Synthetic oligonucleotide"
  source 1..20: mol_type = other RNA
tcttttaatgaaacttaaat

SEQ ID NO: 3514 - RNA, 20 nt, synthetic construct
  misc_feature 1..20: note = source = /note="Description of Artificial Sequence: Synthetic oligonucleotide"
  source 1..20: mol_type = other RNA
gtattcgttaggatctactt

SEQ ID NO: 3515 - RNA, 20 nt, synthetic construct
  misc_feature 1..20: note = source = /note="Description of Artificial Sequence: Synthetic oligonucleotide"
  source 1..20: mol_type = other RNA
agtattcgttaggatctact

SEQ ID NO: 3516 - RNA, 20 nt, synthetic construct
  misc_feature 1..20: note = source = /note="Description of Artificial Sequence: Synthetic oligonucleotide"
  source 1..20: mol_type = other RNA
attttttctgtcttagtctg

SEQ ID NO: 3517 - RNA, 20 nt, synthetic construct
  misc_feature 1..20: note = source = /note="Description of Artificial Sequence: Synthetic oligonucleotide"
  source 1..20: mol_type = other RNA
aggattatttgtatacttat

SEQ ID NO: 3518 - RNA, 20 nt, synthetic construct
  misc_feature 1..20: note = source = /note="Description of Artificial Sequence: Synthetic oligonucleotide"
  source 1..20: mol_type = other RNA
taggattatttgtatactta

SEQ ID NO: 3519 - RNA, 20 nt, synthetic construct
  misc_feature 1..20: note = source = /note="Description of Artificial Sequence: Synthetic oligonucleotide"
  source 1..20: mol_type = other RNA
aaattgtctcggtatagacc

SEQ ID NO: 3520 - RNA, 20 nt, synthetic construct
  misc_feature 1..20: note = source = /note="Description of Artificial Sequence: Synthetic oligonucleotide"
  source 1..20: mol_type = other RNA
gtaaaattgtctcggtatag

SEQ ID NO: 3521 - RNA, 20 nt, synthetic construct
  misc_feature 1..20: note = source = /note="Description of Artificial Sequence: Synthetic oligonucleotide"
  source 1..20: mol_type = other RNA
ttcatggaattcgatttatt

SEQ ID NO: 3522 - RNA, 20 nt, synthetic construct
  misc_feature 1..20: note = source = /note="Description of Artificial Sequence: Synthetic oligonucleotide"
  source 1..20: mol_type = other RNA
tctttattagtttccatgtt

SEQ ID NO: 3523 - RNA, 20 nt, synthetic construct
  misc_feature 1..20: note = source = /note="Description of Artificial Sequence: Synthetic oligonucleotide"
  source 1..20: mol_type = other RNA
ttcttccttctttattagtt

SEQ ID NO: 3524 - RNA, 20 nt, synthetic construct
  misc_feature 1..20: note = source = /note="Description of Artificial Sequence: Synthetic oligonucleotide"
  source 1..20: mol_type = other RNA
ttctatcccactttttttct

SEQ ID NO: 3525 - RNA, 20 nt, synthetic construct
  misc_feature 1..20: note = source = /note="Description of Artificial Sequence: Synthetic oligonucleotide"
  source 1..20: mol_type = other RNA
tgtactcaaagtatttctat

SEQ ID NO: 3526 - RNA, 20 nt, synthetic construct
  misc_feature 1..20: note = source = /note="Description of Artificial Sequence: Synthetic oligonucleotide"
  source 1..20: mol_type = other RNA
ttgtactcaaagtatttcta

SEQ ID NO: 3527 - RNA, 20 nt, synthetic construct
  misc_feature 1..20: note = source = /note="Description of Artificial Sequence: Synthetic oligonucleotide"
  source 1..20: mol_type = other RNA
ttgtctactttttatacact

SEQ ID NO: 3528 - RNA, 20 nt, synthetic construct
  misc_feature 1..20: note = source = /note="Description of Artificial Sequence: Synthetic oligonucleotide"
  source 1..20: mol_type = other RNA
tcttatcttttacctgaaga

SEQ ID NO: 3529 - RNA, 20 nt, synthetic construct
  misc_feature 1..20: note = source = /note="Description of Artificial Sequence: Synthetic oligonucleotide"
  source 1..20: mol_type = other RNA
tagttagtctcttatctttt

SEQ ID NO: 3530 - RNA, 20 nt, synthetic construct
  misc_feature 1..20: note = source = /note="Description of Artificial Sequence: Synthetic oligonucleotide"
  source 1..20: mol_type = other RNA
tatgatttgagccacgatta

SEQ ID NO: 3531 - RNA, 20 nt, synthetic construct
  misc_feature 1..20: note = source = /note="Description of Artificial Sequence: Synthetic oligonucleotide"
  source 1..20: mol_type = other RNA
tattgtttttagatatagtt

SEQ ID NO: 3532 - RNA, 20 nt, synthetic construct
  misc_feature 1..20: note = source = /note="Description of Artificial Sequence: Synthetic oligonucleotide"
  source 1..20: mol_type = other RNA
agcactgttatttttaaaag

SEQ ID NO: 3533 - RNA, 20 nt, synthetic construct
  misc_feature 1..20: note = source = /note="Description of Artificial Sequence: Synthetic oligonucleotide"
  source 1..20: mol_type = other RNA
tagcactgttatttttaaaa

SEQ ID NO: 3534 - RNA, 20 nt, synthetic construct
  misc_feature 1..20: note = source = /note="Description of Artificial Sequence: Synthetic oligonucleotide"
  source 1..20: mol_type = other RNA
ctagcactgttatttttaaa

SEQ ID NO: 3535 - RNA, 20 nt, synthetic construct
  misc_feature 1..20: note = source = /note="Description of Artificial Sequence: Synthetic oligonucleotide"
  source 1..20: mol_type = other RNA
tactaaagcattattattga

SEQ ID NO: 3536 - RNA, 20 nt, synthetic construct
  misc_feature 1..20: note = source = /note="Description of Artificial Sequence: Synthetic oligonucleotide"
  source 1..20: mol_type = other RNA
atactaaagcattattattg

SEQ ID NO: 3537 - RNA, 20 nt, synthetic construct
  misc_feature 1..20: note = source = /note="Description of Artificial Sequence: Synthetic oligonucleotide"
  source 1..20: mol_type = other RNA
cacagtcactgactatgcct

SEQ ID NO: 3538 - RNA, 20 nt, synthetic construct
  misc_feature 1..20: note = source = /note="Description of Artificial Sequence: Synthetic oligonucleotide"
  source 1..20: mol_type = other RNA
gcacagtcactgactatgcc

SEQ ID NO: 3539 - RNA, 20 nt, synthetic construct
  misc_feature 1..20: note = source = /note="Description of Artificial Sequence: Synthetic oligonucleotide"
  source 1..20: mol_type = other RNA
caggatgaactgctactgct

SEQ ID NO: 3540 - RNA, 20 nt, synthetic construct
  misc_feature 1..20: note = source = /note="Description of Artificial Sequence: Synthetic oligonucleotide"
  source 1..20: mol_type = other RNA
gttacaccttagatctgtac

SEQ ID NO: 3541 - RNA, 20 nt, synthetic construct
  misc_feature 1..20: note = source = /note="Description of Artificial Sequence: Synthetic oligonucleotide"
  source 1..20: mol_type = other RNA
gacaaccaaagaatctccaa

SEQ ID NO: 3542 - RNA, 20 nt, synthetic construct
  misc_feature 1..20: note = source = /note="Description of Artificial Sequence: Synthetic oligonucleotide"
  source 1..20: mol_type = other RNA
agacaaccaaagaatctcca

SEQ ID NO: 3543 - RNA, 20 nt, synthetic construct
  misc_feature 1..20: note = source = /note="Description of Artificial Sequence: Synthetic oligonucleotide"
  source 1..20: mol_type = other RNA
ctgttattgaacagcaagat

SEQ ID NO: 3544 - RNA, 20 nt, synthetic construct
  misc_feature 1..20: note = source = /note="Description of Artificial Sequence: Synthetic oligonucleotide"
  source 1..20: mol_type = other RNA
tttaaagactgttaagcagt

SEQ ID NO: 3545 - RNA, 20 nt, synthetic construct
  misc_feature 1..20: note = source = /note="Description of Artificial Sequence: Synthetic oligonucleotide"
  source 1..20: mol_type = other RNA
ttttaaagactgttaagcag

SEQ ID NO: 3546 - RNA, 20 nt, synthetic construct
  misc_feature 1..20: note = source = /note="Description of Artificial Sequence: Synthetic oligonucleotide"
  source 1..20: mol_type = other RNA
aggcaagattacgtccttac

SEQ ID NO: 3547 - RNA, 20 nt, synthetic construct
  misc_feature 1..20: note = source = /note="Description of Artificial Sequence: Synthetic oligonucleotide"
  source 1..20: mol_type = other RNA
taggcaagattacgtcctta

SEQ ID NO: 3548 - RNA, 20 nt, synthetic construct
  misc_feature 1..20: note = source = /note="Description of Artificial Sequence: Synthetic oligonucleotide"
  source 1..20: mol_type = other RNA
ttccttcattccttaaagct

SEQ ID NO: 3549 - RNA, 20 nt, synthetic construct
  misc_feature 1..20: note = source = /note="Description of Artificial Sequence: Synthetic oligonucleotide"
  source 1..20: mol_type = other RNA
ctcagttgtcttgtacaacc

SEQ ID NO: 3550 - RNA, 20 nt, synthetic construct
  misc_feature 1..20: note = source = /note="Description of Artificial Sequence: Synthetic oligonucleotide"
  source 1..20: mol_type = other RNA
catctcagttgtcttgtaca

SEQ ID NO: 3551 - RNA, 20 nt, synthetic construct
  misc_feature 1..20: note = source = /note="Description of Artificial Sequence: Synthetic oligonucleotide"
  source 1..20: mol_type = other RNA
tctaggacttatatgaaatg

SEQ ID NO: 3552 - RNA, 20 nt, synthetic construct
  misc_feature 1..20: note = source = /note="Description of Artificial Sequence: Synthetic oligonucleotide"
  source 1..20: mol_type = other RNA
cctctacctttaaccacttt

SEQ ID NO: 3553 - RNA, 20 nt, synthetic construct
  misc_feature 1..20: note = source = /note="Description of Artificial Sequence: Synthetic oligonucleotide"
  source 1..20: mol_type = other RNA
caaacttacctctaccttta

SEQ ID NO: 3554 - RNA, 20 nt, synthetic construct
  misc_feature 1..20: note = source = /note="Description of Artificial Sequence: Synthetic oligonucleotide"
  source 1..20: mol_type = other RNA
cttccaccaaacttacctct

SEQ ID NO: 3555 - RNA, 20 nt, synthetic construct
  misc_feature 1..20: note = source = /note="Description of Artificial Sequence: Synthetic oligonucleotide"
  source 1..20: mol_type = other RNA
tgtgtacttccaccaaactt

SEQ ID NO: 3556 - RNA, 20 nt, synthetic construct
  misc_feature 1..20: note = source = /note="Description of Artificial Sequence: Synthetic oligonucleotide"
  source 1..20: mol_type = other RNA
aagtttcattgtgtacttcc

SEQ ID NO: 3557 - RNA, 20 nt, synthetic construct
  misc_feature 1..20: note = source = /note="Description of Artificial Sequence: Synthetic oligonucleotide"
  source 1..20: mol_type = other RNA
gaaaagtttcattgtgtact

SEQ ID NO: 3558 - RNA, 20 nt, synthetic construct
  misc_feature 1..20: note = source = /note="Description of Artificial Sequence: Synthetic oligonucleotide"
  source 1..20: mol_type = other RNA
tttgtccctttgggtactgt

SEQ ID NO: 3559 - RNA, 20 nt, synthetic construct
  misc_feature 1..20: note = source = /note="Description of Artificial Sequence: Synthetic oligonucleotide"
  source 1..20: mol_type = other RNA
ctttgtccctttgggtactg

SEQ ID NO: 3560 - RNA, 20 nt, synthetic construct
  misc_feature 1..20: note = source = /note="Description of Artificial Sequence: Synthetic oligonucleotide"
  source 1..20: mol_type = other RNA
cccctcgtttcgatctttgt

SEQ ID NO: 3561 - RNA, 20 nt, synthetic construct
  misc_feature 1..20: note = source = /note="Description of Artificial Sequence: Synthetic oligonucleotide"
  source 1..20: mol_type = other RNA
ccccctcgtttcgatctttg

SEQ ID NO: 3562 - RNA, 20 nt, synthetic construct
  misc_feature 1..20: note = source = /note="Description of Artificial Sequence: Synthetic oligonucleotide"
  source 1..20: mol_type = other RNA
gggtgccactccattcttcc

SEQ ID NO: 3563 - RNA, 20 nt, synthetic construct
  misc_feature 1..20: note = source = /note="Description of Artificial Sequence: Synthetic oligonucleotide"
  source 1..20: mol_type = other RNA
tgggtgccactccattcttc

SEQ ID NO: 3564 - RNA, 20 nt, synthetic construct
  misc_feature 1..20: note = source = /note="Description of Artificial Sequence: Synthetic oligonucleotide"
  source 1..20: mol_type = other RNA
ttgggtgccactccattctt

SEQ ID NO: 3565 - RNA, 20 nt, synthetic construct
  misc_feature 1..20: note = source = /note="Description of Artificial Sequence: Synthetic oligonucleotide"
  source 1..20: mol_type = other RNA
tttgggtgccactccattct

SEQ ID NO: 3566 - RNA, 20 nt, synthetic construct
  misc_feature 1..20: note = source = /note="Description of Artificial Sequence: Synthetic oligonucleotide"
  source 1..20: mol_type = other RNA
aacccatttttgggtgccac

SEQ ID NO: 3567 - RNA, 20 nt, synthetic construct
  misc_feature 1..20: note = source = /note="Description of Artificial Sequence: Synthetic oligonucleotide"
  source 1..20: mol_type = other RNA
aaacaaacccatttttgggt

SEQ ID NO: 3568 - RNA, 20 nt, synthetic construct
  misc_feature 1..20: note = source = /note="Description of Artificial Sequence: Synthetic oligonucleotide"
  source 1..20: mol_type = other RNA
ctagtgaacttaaaaacaaa

SEQ ID NO: 3569 - RNA, 20 nt, synthetic construct
  misc_feature 1..20: note = source = /note="Description of Artificial Sequence: Synthetic oligonucleotide"
  source 1..20: mol_type = other RNA
actagtgaacttaaaaacaa

SEQ ID NO: 3570 - RNA, 20 nt, synthetic construct
  misc_feature 1..20: note = source = /note="Description of Artificial Sequence: Synthetic oligonucleotide"
  source 1..20: mol_type = other RNA
ttaccaaaattcgtctcctc

SEQ ID NO: 3571 - RNA, 20 nt, synthetic construct
  misc_feature 1..20: note = source = /note="Description of Artificial Sequence: Synthetic oligonucleotide"
  source 1..20: mol_type = other RNA
ggtaattaccaaaattcgtc

SEQ ID NO: 3572 - RNA, 20 nt, synthetic construct
  misc_feature 1..20: note = source = /note="Description of Artificial Sequence: Synthetic oligonucleotide"
  source 1..20: mol_type = other RNA
cactttgtctctgggtaatt

SEQ ID NO: 3573 - RNA, 20 nt, synthetic construct
  misc_feature 1..20: note = source = /note="Description of Artificial Sequence: Synthetic oligonucleotide"
  source 1..20: mol_type = other RNA
cacccagtacttttcccgaa

SEQ ID NO: 3574 - RNA, 20 nt, synthetic construct
  misc_feature 1..20: note = source = /note="Description of Artificial Sequence: Synthetic oligonucleotide"
  source 1..20: mol_type = other RNA
cctgaccacccagtactttt

SEQ ID NO: 3575 - RNA, 20 nt, synthetic construct
  misc_feature 1..20: note = source = /note="Description of Artificial Sequence: Synthetic oligonucleotide"
  source 1..20: mol_type = other RNA
tcctgaccacccagtacttt

SEQ ID NO: 3576 - RNA, 20 nt, synthetic construct
  misc_feature 1..20: note = source = /note="Description of Artificial Sequence: Synthetic oligonucleotide"
  source 1..20: mol_type = other RNA
gttaagtgaactcctgacca

SEQ ID NO: 3577 - RNA, 20 nt, synthetic construct
  misc_feature 1..20: note = source = /note="Description of Artificial Sequence: Synthetic oligonucleotide"
  source 1..20: mol_type = other RNA
ggttaagtgaactcctgacc

SEQ ID NO: 3578 - RNA, 20 nt, synthetic construct
  misc_feature 1..20: note = source = /note="Description of Artificial Sequence: Synthetic oligonucleotide"
  source 1..20: mol_type = other RNA
gtcggttaagtgaactcctg

SEQ ID NO: 3579 - RNA, 20 nt, synthetic construct
  misc_feature 1..20: note = source = /note="Description of Artificial Sequence: Synthetic oligonucleotide"
  source 1..20: mol_type = other RNA
ttatcgtcggttaagtgaac

SEQ ID NO: 3580 - RNA, 20 nt, synthetic construct
  misc_feature 1..20: note = source = /note="Description of Artificial Sequence: Synthetic oligonucleotide"
  source 1..20: mol_type = other RNA
ccctcttatcaccgttcttt

SEQ ID NO: 3581 - RNA, 20 nt, synthetic construct
  misc_feature 1..20: note = source = /note="Description of Artificial Sequence: Synthetic oligonucleotide"
  source 1..20: mol_type = other RNA
ttatcttactccctcttatc

SEQ ID NO: 3582 - RNA, 20 nt, synthetic construct
  misc_feature 1..20: note = source = /note="Description of Artificial Sequence: Synthetic oligonucleotide"
  source 1..20: mol_type = other RNA
tcctttaatcttatcttact

SEQ ID NO: 3583 - RNA, 20 nt, synthetic construct
  misc_feature 1..20: note = source = /note="Description of Artificial Sequence: Synthetic oligonucleotide"
  source 1..20: mol_type = other RNA
ttcctttaatcttatcttac

SEQ ID NO: 3584 - RNA, 20 nt, synthetic construct
  misc_feature 1..20: note = source = /note="Description of Artificial Sequence: Synthetic oligonucleotide"
  source 1..20: mol_type = other RNA
ggtcctgtcgttcttttggt

SEQ ID NO: 3585 - RNA, 20 nt, synthetic construct
  misc_feature 1..20: note = source = /note="Description of Artificial Sequence: Synthetic oligonucleotide"
  source 1..20: mol_type = other RNA
tcctacgagaagaacaacgg

SEQ ID NO: 3586 - RNA, 20 nt, synthetic construct
  misc_feature 1..20: note = source = /note="Description of Artificial Sequence: Synthetic oligonucleotide"
  source 1..20: mol_type = other RNA
acgtttccggacctcctttt

SEQ ID NO: 3587 - RNA, 20 nt, synthetic construct
  misc_feature 1..20: note = source = /note="Description of Artificial Sequence: Synthetic oligonucleotide"
  source 1..20: mol_type = other RNA
gtcgttcacgtttccggacc

SEQ ID NO: 3588 - RNA, 20 nt, synthetic construct
  misc_feature 1..20: note = source = /note="Description of Artificial Sequence: Synthetic oligonucleotide"
  source 1..20: mol_type = other RNA
cttgtcgttcacgtttccgg

SEQ ID NO: 3589 - RNA, 20 nt, synthetic construct
  misc_feature 1..20: note = source = /note="Description of Artificial Sequence: Synthetic oligonucleotide"
  source 1..20: mol_type = other RNA
tctcccttgtcgttcacgtt

SEQ ID NO: 3590 - RNA, 20 nt, synthetic construct
  misc_feature 1..20: note = source = /note="Description of Artificial Sequence: Synthetic oligonucleotide"
  source 1..20: mol_type = other RNA
ccttcccacgaggtccttct

SEQ ID NO: 3591 - RNA, 20 nt, synthetic construct
  misc_feature 1..20: note = source = /note="Description of Artificial Sequence: Synthetic oligonucleotide"
  source 1..20: mol_type = other RNA
tccttcccacgaggtccttc

SEQ ID NO: 3592 - RNA, 20 nt, synthetic construct
  misc_feature 1..20: note = source = /note="Description of Artificial Sequence: Synthetic oligonucleotide"
  source 1..20: mol_type = other RNA
gagacttccttcccacgagg

SEQ ID NO: 3593 - RNA, 20 nt, synthetic construct
  misc_feature 1..20: note = source = /note="Description of Artificial Sequence: Synthetic oligonucleotide"
  source 1..20: mol_type = other RNA
ggacaccgagagacttcctt

SEQ ID NO: 3594 - RNA, 20 nt, synthetic construct
  misc_feature 1..20: note = source = /note="Description of Artificial Sequence: Synthetic oligonucleotide"
  source 1..20: mol_type = other RNA
tggacaccgagagacttcct

SEQ ID NO: 3595 - RNA, 20 nt, synthetic construct
  misc_feature 1..20: note = source = /note="Description of Artificial Sequence: Synthetic oligonucleotide"
  source 1..20: mol_type = other RNA
gttatggacaccgagagact

SEQ ID NO: 3596 - RNA, 20 nt, synthetic construct
  misc_feature 1..20: note = source = /note="Description of Artificial Sequence: Synthetic oligonucleotide"
  source 1..20: mol_type = other RNA
tttctatctttgttatggac

SEQ ID NO: 3597 - RNA, 20 nt, synthetic construct
  misc_feature 1..20: note = source = /note="Description of Artificial Sequence: Synthetic oligonucleotide"
  source 1..20: mol_type = other RNA
tgtgagttcctctctaatct

SEQ ID NO: 3598 - RNA, 20 nt, synthetic construct
  misc_feature 1..20: note = source = /note="Description of Artificial Sequence: Synthetic oligonucleotide"
  source 1..20: mol_type = other RNA
gagactttttcattgtgagt

SEQ ID NO: 3599 - RNA, 20 nt, synthetic construct
  misc_feature 1..20: note = source = /note="Description of Artificial Sequence: Synthetic oligonucleotide"
  source 1..20: mol_type = other RNA
tctgaatctatcttaccaat

SEQ ID NO: 3600 - RNA, 20 nt, synthetic construct
  misc_feature 1..20: note = source = /note="Description of Artificial Sequence: Synthetic oligonucleotide"
  source 1..20: mol_type = other RNA
ttctgaatctatcttaccaa

SEQ ID NO: 3601 - RNA, 20 nt, synthetic construct
  misc_feature 1..20: note = source = /note="Description of Artificial Sequence: Synthetic oligonucleotide"
  source 1..20: mol_type = other RNA
cagagttctgaatctatctt

SEQ ID NO: 3602 - RNA, 20 nt, synthetic construct
  misc_feature 1..20: note = source = /note="Description of Artificial Sequence: Synthetic oligonucleotide"
  source 1..20: mol_type = other RNA
aaaagagagaaaataaagca

SEQ ID NO: 3603 - RNA, 20 nt, synthetic construct
  misc_feature 1..20: note = source = /note="Description of Artificial Sequence: Synthetic oligonucleotide"
  source 1..20: mol_type = other RNA
ggacaaggggttattggata

SEQ ID NO: 3604 - RNA, 20 nt, synthetic construct
  misc_feature 1..20: note = source = /note="Description of Artificial Sequence: Synthetic oligonucleotide"
  source 1..20: mol_type = other RNA
tggacaaggggttattggat

SEQ ID NO: 3605 - RNA, 20 nt, synthetic construct
  misc_feature 1..20: note = source = /note="Description of Artificial Sequence: Synthetic oligonucleotide"
  source 1..20: mol_type = other RNA
cacatatgacgagcccacta

SEQ ID NO: 3606 - RNA, 20 nt, synthetic construct
  misc_feature 1..20: note = source = /note="Description of Artificial Sequence: Synthetic oligonucleotide"
  source 1..20: mol_type = other RNA
cccacttcacatatgacgag

SEQ ID NO: 3607 - RNA, 20 nt, synthetic construct
  misc_feature 1..20: note = source = /note="Description of Artificial Sequence: Synthetic oligonucleotide"
  source 1..20: mol_type = other RNA
tcccacttcacatatgacga

SEQ ID NO: 3608 - RNA, 20 nt, synthetic construct
  misc_feature 1..20: note = source = /note="Description of Artificial Sequence: Synthetic oligonucleotide"
  source 1..20: mol_type = other RNA
ccttattttctgatgcttat

SEQ ID NO: 3609 - RNA, 20 nt, synthetic construct
  misc_feature 1..20: note = source = /note="Description of Artificial Sequence: Synthetic oligonucleotide"
  source 1..20: mol_type = other RNA
tccttattttctgatgctta

SEQ ID NO: 3610 - RNA, 20 nt, synthetic construct
  misc_feature 1..20: note = source = /note="Description of Artificial Sequence: Synthetic oligonucleotide"
  source 1..20: mol_type = other RNA
ttttcccacccttcccccac

SEQ ID NO: 3611 - RNA, 20 nt, synthetic construct
  misc_feature 1..20: note = source = /note="Description of Artificial Sequence: Synthetic oligonucleotide"
  source 1..20: mol_type = other RNA
tccccttttcccacccttcc

SEQ ID NO: 3612 - RNA, 20 nt, synthetic construct
  misc_feature 1..20: note = source = /note="Description of Artificial Sequence: Synthetic oligonucleotide"
  source 1..20: mol_type = other RNA
gtccccttttcccacccttc

SEQ ID NO: 3613 - RNA, 20 nt, synthetic construct
  misc_feature 1..20: note = source = /note="Description of Artificial Sequence: Synthetic oligonucleotide"
  source 1..20: mol_type = other RNA
agtccccttttcccaccctt

SEQ ID NO: 3614 - RNA, 20 nt, synthetic construct
  misc_feature 1..20: note = source = /note="Description of Artificial Sequence: Synthetic oligonucleotide"
  source 1..20: mol_type = other RNA
gagtccccttttcccaccct

SEQ ID NO: 3615 - RNA, 20 nt, synthetic construct
  misc_feature 1..20: note = source = /note="Description of Artificial Sequence: Synthetic oligonucleotide"
  source 1..20: mol_type = other RNA
ccctgagtccccttttccca

SEQ ID NO: 3616 - RNA, 20 nt, synthetic construct
  misc_feature 1..20: note = source = /note="Description of Artificial Sequence: Synthetic oligonucleotide"
  source 1..20: mol_type = other RNA
tccctgagtccccttttccc

SEQ ID NO: 3617 - RNA, 20 nt, synthetic construct
  misc_feature 1..20: note = source = /note="Description of Artificial Sequence: Synthetic oligonucleotide"
  source 1..20: mol_type = other RNA
agatccctgagtcccctttt

SEQ ID NO: 3618 - RNA, 20 nt, synthetic construct
  misc_feature 1..20: note = source = /note="Description of Artificial Sequence: Synthetic oligonucleotide"
  source 1..20: mol_type = other RNA
gagatccctgagtccccttt

SEQ ID NO: 3619 - RNA, 20 nt, synthetic construct
  misc_feature 1..20: note = source = /note="Description of Artificial Sequence: Synthetic oligonucleotide"
  source 1..20: mol_type = other RNA
ttacctgagatccctgagtc

SEQ ID NO: 3620 - RNA, 20 nt, synthetic construct
  misc_feature 1..20: note = source = /note="Description of Artificial Sequence: Synthetic oligonucleotide"
  source 1..20: mol_type = other RNA
gttacctgagatccctgagt

SEQ ID NO: 3621 - RNA, 20 nt, synthetic construct
  misc_feature 1..20: note = source = /note="Description of Artificial Sequence: Synthetic oligonucleotide"
  source 1..20: mol_type = other RNA
tgttacctgagatccctgag

SEQ ID NO: 3622 - RNA, 20 nt, synthetic construct
  misc_feature 1..20: note = source = /note="Description of Artificial Sequence: Synthetic oligonucleotide"
  source 1..20: mol_type = other RNA
cttactgtgttacctgagat

SEQ ID NO: 3623 - RNA, 20 nt, synthetic construct
  misc_feature 1..20: note = source = /note="Description of Artificial Sequence: Synthetic oligonucleotide"
  source 1..20: mol_type = other RNA
tcttactgtgttacctgaga

SEQ ID NO: 3624 - RNA, 20 nt, synthetic construct
  misc_feature 1..20: note = source = /note="Description of Artificial Sequence: Synthetic oligonucleotide"
  source 1..20: mol_type = other RNA
ttccgtattcttactgtgtt

SEQ ID NO: 3625 - RNA, 20 nt, synthetic construct
  misc_feature 1..20: note = source = /note="Description of Artificial Sequence: Synthetic oligonucleotide"
  source 1..20: mol_type = other RNA
cgatgcgatactcctacgtt

SEQ ID NO: 3626 - RNA, 20 nt, synthetic construct
  misc_feature 1..20: note = source = /note="Description of Artificial Sequence: Synthetic oligonucleotide"
  source 1..20: mol_type = other RNA
attcaccctcgatgcgatac

SEQ ID NO: 3627 - RNA, 20 nt, synthetic construct
  misc_feature 1..20: note = source = /note="Description of Artificial Sequence: Synthetic oligonucleotide"
  source 1..20: mol_type = other RNA
tatacaagagtgagtattca

SEQ ID NO: 3628 - RNA, 20 nt, synthetic construct
  misc_feature 1..20: note = source = /note="Description of Artificial Sequence: Synthetic oligonucleotide"
  source 1..20: mol_type = other RNA
gtatacaagagtgagtattc

SEQ ID NO: 3629 - RNA, 20 nt, synthetic construct
  misc_feature 1..20: note = source = /note="Description of Artificial Sequence: Synthetic oligonucleotide"
  source 1..20: mol_type = other RNA
attcacttcattgagtccct

SEQ ID NO: 3630 - RNA, 20 nt, synthetic construct
  misc_feature 1..20: note = source = /note="Description of Artificial Sequence: Synthetic oligonucleotide"
  source 1..20: mol_type = other RNA
taagattcacttcattgagt

SEQ ID NO: 3631 - RNA, 20 nt, synthetic construct
  misc_feature 1..20: note = source = /note="Description of Artificial Sequence: Synthetic oligonucleotide"
  source 1..20: mol_type = other RNA
ataagattcacttcattgag

SEQ ID NO: 3632 - RNA, 20 nt, synthetic construct
  misc_feature 1..20: note = source = /note="Description of Artificial Sequence: Synthetic oligonucleotide"
  source 1..20: mol_type = other RNA
acgtcactggacctattctg

SEQ ID NO: 3633 - RNA, 20 nt, synthetic construct
  misc_feature 1..20: note = source = /note="Description of Artificial Sequence: Synthetic oligonucleotide"
  source 1..20: mol_type = other RNA
attaccgtaaacgtcactgg

SEQ ID NO: 3634 - RNA, 20 nt, synthetic construct
  misc_feature 1..20: note = source = /note="Description of Artificial Sequence: Synthetic oligonucleotide"
  source 1..20: mol_type = other RNA
gtatttttccttacttaatt

SEQ ID NO: 3635 - RNA, 20 nt, synthetic construct
  misc_feature 1..20: note = source = /note="Description of Artificial Sequence: Synthetic oligonucleotide"
  source 1..20: mol_type = other RNA
ttatgatgagtcggtatttt

SEQ ID NO: 3636 - RNA, 20 nt, synthetic construct
  misc_feature 1..20: note = source = /note="Description of Artificial Sequence: Synthetic oligonucleotide"
  source 1..20: mol_type = other RNA
tgacaccatataaatattct

SEQ ID NO: 3637 - RNA, 20 nt, synthetic construct
  misc_feature 1..20: note = source = /note="Description of Artificial Sequence: Synthetic oligonucleotide"
  source 1..20: mol_type = other RNA
cactcatcaatttctttgac

SEQ ID NO: 3638 - RNA, 20 nt, synthetic construct
  misc_feature 1..20: note = source = /note="Description of Artificial Sequence: Synthetic oligonucleotide"
  source 1..20: mol_type = other RNA
gttgggtttacgagcagtta

SEQ ID NO: 3639 - RNA, 20 nt, synthetic construct
  misc_feature 1..20: note = source = /note="Description of Artificial Sequence: Synthetic oligonucleotide"
  source 1..20: mol_type = other RNA
ttaaacgttaacgtttttac

SEQ ID NO: 3640 - RNA, 20 nt, synthetic construct
  misc_feature 1..20: note = source = /note="Description of Artificial Sequence: Synthetic oligonucleotide"
  source 1..20: mol_type = other RNA
tgatgacccatagatgggtc

SEQ ID NO: 3641 - RNA, 20 nt, synthetic construct
  misc_feature 1..20: note = source = /note="Description of Artificial Sequence: Synthetic oligonucleotide"
  source 1..20: mol_type = other RNA
ctaggtcgttagggtgatga

SEQ ID NO: 3642 - RNA, 20 nt, synthetic construct
  misc_feature 1..20: note = source = /note="Description of Artificial Sequence: Synthetic oligonucleotide"
  source 1..20: mol_type = other RNA
actaggtcgttagggtgatg

SEQ ID NO: 3643 - RNA, 20 nt, synthetic construct
  misc_feature 1..20: note = source = /note="Description of Artificial Sequence: Synthetic oligonucleotide"
  source 1..20: mol_type = other RNA
tcggtgataccttttgtcac

SEQ ID NO: 3644 - RNA, 20 nt, synthetic construct
  misc_feature 1..20: note = source = /note="Description of Artificial Sequence: Synthetic oligonucleotide"
  source 1..20: mol_type = other RNA
catttgatcatgtcggtgat

SEQ ID NO: 3645 - RNA, 20 nt, synthetic construct
  misc_feature 1..20: note = source = /note="Description of Artificial Sequence: Synthetic oligonucleotide"
  source 1..20: mol_type = other RNA
ttgtgaagatgtgacgacca

SEQ ID NO: 3646 - RNA, 20 nt, synthetic construct
  misc_feature 1..20: note = source = /note="Description of Artificial Sequence: Synthetic oligonucleotide"
  source 1..20: mol_type = other RNA
cttgtgaagatgtgacgacc

SEQ ID NO: 3647 - RNA, 20 nt, synthetic construct
  misc_feature 1..20: note = source = /note="Description of Artificial Sequence: Synthetic oligonucleotide"
  source 1..20: mol_type = other RNA
tctcttgtgaagatgtgacg

SEQ ID NO: 3648 - RNA, 20 nt, synthetic construct
  misc_feature 1..20: note = source = /note="Description of Artificial Sequence: Synthetic oligonucleotide"
  source 1..20: mol_type = other RNA
tcatctgcaaccgtacctat

SEQ ID NO: 3649 - RNA, 20 nt, synthetic construct
  misc_feature 1..20: note = source = /note="Description of Artificial Sequence: Synthetic oligonucleotide"
  source 1..20: mol_type = other RNA
tttttatcatctgcaaccgt

SEQ ID NO: 3650 - RNA, 20 nt, synthetic construct
  misc_feature 1..20: note = source = /note="Description of Artificial Sequence: Synthetic oligonucleotide"
  source 1..20: mol_type = other RNA
ttagttttttatcatctgca

SEQ ID NO: 3651 - RNA, 20 nt, synthetic construct
  misc_feature 1..20: note = source = /note="Description of Artificial Sequence: Synthetic oligonucleotide"
  source 1..20: mol_type = other RNA
tatgaaatgaggacgttctt

SEQ ID NO: 3652 - RNA, 20 nt, synthetic construct
  misc_feature 1..20: note = source = /note="Description of Artificial Sequence: Synthetic oligonucleotide"
  source 1..20: mol_type = other RNA
aagttatagtgattactagt

SEQ ID NO: 3653 - RNA, 20 nt, synthetic construct
  misc_feature 1..20: note = source = /note="Description of Artificial Sequence: Synthetic oligonucleotide"
  source 1..20: mol_type = other RNA
caagttatagtgattactag

SEQ ID NO: 3654 - RNA, 20 nt, synthetic construct
  misc_feature 1..20: note = source = /note="Description of Artificial Sequence: Synthetic oligonucleotide"
  source 1..20: mol_type = other RNA
aggatagtttttcacccgat

SEQ ID NO: 3655 - RNA, 20 nt, synthetic construct
  misc_feature 1..20: note = source = /note="Description of Artificial Sequence: Synthetic oligonucleotide"
  source 1..20: mol_type = other RNA
tttgttaggatagtttttca

SEQ ID NO: 3656 - RNA, 20 nt, synthetic construct
  misc_feature 1..20: note = source = /note="Description of Artificial Sequence: Synthetic oligonucleotide"
  source 1..20: mol_type = other RNA
gtttgttaggatagtttttc

SEQ ID NO: 3657 - RNA, 20 nt, synthetic construct
  misc_feature 1..20: note = source = /note="Description of Artificial Sequence: Synthetic oligonucleotide"
  source 1..20: mol_type = other RNA
ccttgaggttgtttaatcgt

SEQ ID NO: 3658 - RNA, 20 nt, synthetic construct
  misc_feature 1..20: note = source = /note="Description of Artificial Sequence: Synthetic oligonucleotide"
  source 1..20: mol_type = other RNA
tgattatagatcttagatgt

SEQ ID NO: 3659 - RNA, 20 nt, synthetic construct
  misc_feature 1..20: note = source = /note="Description of Artificial Sequence: Synthetic oligonucleotide"
  source 1..20: mol_type = other RNA
tgttagatacgtaggccgtt

SEQ ID NO: 3660 - RNA, 20 nt, synthetic construct
  misc_feature 1..20: note = source = /note="Description of Artificial Sequence: Synthetic oligonucleotide"
  source 1..20: mol_type = other RNA
tagaagtgttagatacgtag

SEQ ID NO: 3661 - RNA, 20 nt, synthetic construct
  misc_feature 1..20: note = source = /note="Description of Artificial Sequence: Synthetic oligonucleotide"
  source 1..20: mol_type = other RNA
tttgtctgttgggtgtctca

SEQ ID NO: 3662 - RNA, 20 nt, synthetic construct
  misc_feature 1..20: note = source = /note="Description of Artificial Sequence: Synthetic oligonucleotide"
  source 1..20: mol_type = other RNA
atttgtctgttgggtgtctc

SEQ ID NO: 3663 - RNA, 20 nt, synthetic construct
  misc_feature 1..20: note = source = /note="Description of Artificial Sequence: Synthetic oligonucleotide"
  source 1..20: mol_type = other RNA
ttctcggagacgtgtcgtta

SEQ ID NO: 3664 - RNA, 20 nt, synthetic construct
  misc_feature 1..20: note = source = /note="Description of Artificial Sequence: Synthetic oligonucleotide"
  source 1..20: mol_type = other RNA
gttgtttttgtttctattta

SEQ ID NO: 3665 - RNA, 20 nt, synthetic construct
  misc_feature 1..20: note = source = /note="Description of Artificial Sequence: Synthetic oligonucleotide"
  source 1..20: mol_type = other RNA
tgggaagatctgtaaccgaa

SEQ ID NO: 3666 - RNA, 20 nt, synthetic construct
  misc_feature 1..20: note = source = /note="Description of Artificial Sequence: Synthetic oligonucleotide"
  source 1..20: mol_type = other RNA
tctttttgggaagatctgta

SEQ ID NO: 3667 - RNA, 20 nt, synthetic construct
  misc_feature 1..20: note = source = /note="Description of Artificial Sequence: Synthetic oligonucleotide"
  source 1..20: mol_type = other RNA
tatatttttagttgagttct

SEQ ID NO: 3668 - RNA, 20 nt, synthetic construct
  misc_feature 1..20: note = source = /note="Description of Artificial Sequence: Synthetic oligonucleotide"
  source 1..20: mol_type = other RNA
tgtttaccacgaccctatcg

SEQ ID NO: 3669 - RNA, 20 nt, synthetic construct
  misc_feature 1..20: note = source = /note="Description of Artificial Sequence: Synthetic oligonucleotide"
  source 1..20: mol_type = other RNA
ggataagttgtttaccacga

SEQ ID NO: 3670 - RNA, 20 nt, synthetic construct
  misc_feature 1..20: note = source = /note="Description of Artificial Sequence: Synthetic oligonucleotide"
  source 1..20: mol_type = other RNA
gggataagttgtttaccacg

SEQ ID NO: 3671 - RNA, 20 nt, synthetic construct
  misc_feature 1..20: note = source = /note="Description of Artificial Sequence: Synthetic oligonucleotide"
  source 1..20: mol_type = other RNA
tcctgtgggataagttgttt

SEQ ID NO: 3672 - RNA, 20 nt, synthetic construct
  misc_feature 1..20: note = source = /note="Description of Artificial Sequence: Synthetic oligonucleotide"
  source 1..20: mol_type = other RNA
tttgtatttaatcatccatt

SEQ ID NO: 3673 - RNA, 20 nt, synthetic construct
  misc_feature 1..20: note = source = /note="Description of Artificial Sequence: Synthetic oligonucleotide"
  source 1..20: mol_type = other RNA
tttgtttttgtatttaatca

SEQ ID NO: 3674 - RNA, 20 nt, synthetic construct
  misc_feature 1..20: note = source = /note="Description of Artificial Sequence: Synthetic oligonucleotide"
  source 1..20: mol_type = other RNA
atccatgtctctggttaccc

SEQ ID NO: 3675 - RNA, 20 nt, synthetic construct
  misc_feature 1..20: note = source = /note="Description of Artificial Sequence: Synthetic oligonucleotide"
  source 1..20: mol_type = other RNA
tatccatgtctctggttacc

SEQ ID NO: 3676 - RNA, 20 nt, synthetic construct
  misc_feature 1..20: note = source = /note="Description of Artificial Sequence: Synthetic oligonucleotide"
  source 1..20: mol_type = other RNA
ttatccatgtctctggttac

SEQ ID NO: 3677 - RNA, 20 nt, synthetic construct
  misc_feature 1..20: note = source = /note="Description of Artificial Sequence: Synthetic oligonucleotide"
  source 1..20: mol_type = other RNA
tttatccatgtctctggtta

SEQ ID NO: 3678 - RNA, 20 nt, synthetic construct
  misc_feature 1..20: note = source = /note="Description of Artificial Sequence: Synthetic oligonucleotide"
  source 1..20: mol_type = other RNA
ttttatccatgtctctggtt

SEQ ID NO: 3679 - RNA, 20 nt, synthetic construct
  misc_feature 1..20: note = source = /note="Description of Artificial Sequence: Synthetic oligonucleotide"
  source 1..20: mol_type = other RNA
gtaccatgaccatattttta

SEQ ID NO: 3680 - RNA, 20 nt, synthetic construct
  misc_feature 1..20: note = source = /note="Description of Artificial Sequence: Synthetic oligonucleotide"
  source 1..20: mol_type = other RNA
tgtggttttgtcgtaccatg

SEQ ID NO: 3681 - RNA, 20 nt, synthetic construct
  misc_feature 1..20: note = source = /note="Description of Artificial Sequence: Synthetic oligonucleotide"
  source 1..20: mol_type = other RNA
ggtatctgtggttttgtcgt

SEQ ID NO: 3682 - RNA, 20 nt, synthetic construct
  misc_feature 1..20: note = source = /note="Description of Artificial Sequence: Synthetic oligonucleotide"
  source 1..20: mol_type = other RNA
aatggactgaaatatgatct

SEQ ID NO: 3683 - RNA, 20 nt, synthetic construct
  misc_feature 1..20: note = source = /note="Description of Artificial Sequence: Synthetic oligonucleotide"
  source 1..20: mol_type = other RNA
gattcgtgtttcttgtttaa

SEQ ID NO: 3684 - RNA, 20 nt, synthetic construct
  misc_feature 1..20: note = source = /note="Description of Artificial Sequence: Synthetic oligonucleotide"
  source 1..20: mol_type = other RNA
tgattcgtgtttcttgttta

SEQ ID NO: 3685 - RNA, 20 nt, synthetic construct
  misc_feature 1..20: note = source = /note="Description of Artificial Sequence: Synthetic oligonucleotide"
  source 1..20: mol_type = other RNA
ggtagtaagaagtgtcttaa

SEQ ID NO: 3686 - RNA, 20 nt, synthetic construct
  misc_feature 1..20: note = source = /note="Description of Artificial Sequence: Synthetic oligonucleotide"
  source 1..20: mol_type = other RNA
aagcagaaacactttgccaa

SEQ ID NO: 3687 - RNA, 20 nt, synthetic construct
  misc_feature 1..20: note = source = /note="Description of Artificial Sequence: Synthetic oligonucleotide"
  source 1..20: mol_type = other RNA
aaagcagaaacactttgcca

SEQ ID NO: 3688 - RNA, 20 nt, synthetic construct
  misc_feature 1..20: note = source = /note="Description of Artificial Sequence: Synthetic oligonucleotide"
  source 1..20: mol_type = other RNA
gagtatcttgagtgtagatg

SEQ ID NO: 3689 - RNA, 20 nt, synthetic construct
  misc_feature 1..20: note = source = /note="Description of Artificial Sequence: Synthetic oligonucleotide"
  source 1..20: mol_type = other RNA
tggtacacgatcggtgacaa

SEQ ID NO: 3690 - RNA, 20 nt, synthetic construct
  misc_feature 1..20: note = source = /note="Description of Artificial Sequence: Synthetic oligonucleotide"
  source 1..20: mol_type = other RNA
ggagtcggaagtctcatcga

SEQ ID NO: 3691 - RNA, 20 nt, synthetic construct
  misc_feature 1..20: note = source = /note="Description of Artificial Sequence: Synthetic oligonucleotide"
  source 1..20: mol_type = other RNA
cggagtcggaagtctcatcg

SEQ ID NO: 3692 - RNA, 20 nt, synthetic construct
  misc_feature 1..20: note = source = /note="Description of Artificial Sequence: Synthetic oligonucleotide"
  source 1..20: mol_type = other RNA
tggggtttgaaaactctgag

SEQ ID NO: 3693 - RNA, 20 nt, synthetic construct
  misc_feature 1..20: note = source = /note="Description of Artificial Sequence: Synthetic oligonucleotide"
  source 1..20: mol_type = other RNA
tgttacgtcgtcgataagtg

SEQ ID NO: 3694 - RNA, 20 nt, synthetic construct
  misc_feature 1..20: note = source = /note="Description of Artificial Sequence: Synthetic oligonucleotide"
  source 1..20: mol_type = other RNA
cccaagagtgacacaactgg

SEQ ID NO: 3695 - RNA, 20 nt, synthetic construct
  misc_feature 1..20: note = source = /note="Description of Artificial Sequence: Synthetic oligonucleotide"
  source 1..20: mol_type = other RNA
tgccaaaaaaaatttctcta

SEQ ID NO: 3696 - RNA, 20 nt, synthetic construct
  misc_feature 1..20: note = source = /note="Description of Artificial Sequence: Synthetic oligonucleotide"
  source 1..20: mol_type = other RNA
ttgccaaaaaaaatttctct

SEQ ID NO: 3697 - RNA, 20 nt, synthetic construct
  misc_feature 1..20: note = source = /note="Description of Artificial Sequence: Synthetic oligonucleotide"
  source 1..20: mol_type = other RNA
cagcagagaaaagacaacac

SEQ ID NO: 3698 - RNA, 20 nt, synthetic construct
  misc_feature 1..20: note = source = /note="Description of Artificial Sequence: Synthetic oligonucleotide"
  source 1..20: mol_type = other RNA
tctatcttcaatttccaatg

SEQ ID NO: 3699 - RNA, 20 nt, synthetic construct
  misc_feature 1..20: note = source = /note="Description of Artificial Sequence: Synthetic oligonucleotide"
  source 1..20: mol_type = other RNA
tttcacctataaataatcaa

SEQ ID NO: 3700 - RNA, 20 nt, synthetic construct
  misc_feature 1..20: note = source = /note="Description of Artificial Sequence: Synthetic oligonucleotide"
  source 1..20: mol_type = other RNA
attgtctcagctattcctca

SEQ ID NO: 3701 - RNA, 20 nt, synthetic construct
  misc_feature 1..20: note = source = /note="Description of Artificial Sequence: Synthetic oligonucleotide"
  source 1..20: mol_type = other RNA
tcctcggctccagaagctcc

SEQ ID NO: 3702 - RNA, 20 nt, synthetic construct
  misc_feature 1..20: note = source = /note="Description of Artificial Sequence: Synthetic oligonucleotide"
  source 1..20: mol_type = other RNA
tttagtgaccaatgtttcct

SEQ ID NO: 3703 - RNA, 20 nt, synthetic construct
  misc_feature 1..20: note = source = /note="Description of Artificial Sequence: Synthetic oligonucleotide"
  source 1..20: mol_type = other RNA
agtacagttgccaatataaa

SEQ ID NO: 3704 - RNA, 20 nt, synthetic construct
  misc_feature 1..20: note = source = /note="Description of Artificial Sequence: Synthetic oligonucleotide"
  source 1..20: mol_type = other RNA
tgtaattgaaacactagcat

SEQ ID NO: 3705 - RNA, 20 nt, synthetic construct
  misc_feature 1..20: note = source = /note="Description of Artificial Sequence: Synthetic oligonucleotide"
  source 1..20: mol_type = other RNA
cacatcatgtttatattttg

SEQ ID NO: 3706 - RNA, 20 nt, synthetic construct
  misc_feature 1..20: note = source = /note="Description of Artificial Sequence: Synthetic oligonucleotide"
  source 1..20: mol_type = other RNA
ggcagtgctcatcttgcagg

SEQ ID NO: 3707 - RNA, 20 nt, synthetic construct
  misc_feature 1..20: note = source = /note="Description of Artificial Sequence: Synthetic oligonucleotide"
  source 1..20: mol_type = other RNA
acaggcagtgctcatcttgc

SEQ ID NO: 3708 - RNA, 20 nt, synthetic construct
  misc_feature 1..20: note = source = /note="Description of Artificial Sequence: Synthetic oligonucleotide"
  source 1..20: mol_type = other RNA
ggaagcagaaggaagaacac

SEQ ID NO: 3709 - RNA, 20 nt, synthetic construct
  misc_feature 1..20: note = source = /note="Description of Artificial Sequence: Synthetic oligonucleotide"
  source 1..20: mol_type = other RNA
gctgaaataaaggaagcaga

SEQ ID NO: 3710 - RNA, 20 nt, synthetic construct
  misc_feature 1..20: note = source = /note="Description of Artificial Sequence: Synthetic oligonucleotide"
  source 1..20: mol_type = other RNA
tagacacacagctgaaataa

SEQ ID NO: 3711 - RNA, 20 nt, synthetic construct
  misc_feature 1..20: note = source = /note="Description of Artificial Sequence: Synthetic oligonucleotide"
  source 1..20: mol_type = other RNA
gtgtagaaggaggaggaagt

SEQ ID NO: 3712 - RNA, 20 nt, synthetic construct
  misc_feature 1..20: note = source = /note="Description of Artificial Sequence: Synthetic oligonucleotide"
  source 1..20: mol_type = other RNA
tctcctagtgtagaaggagg

SEQ ID NO: 3713 - RNA, 20 nt, synthetic construct
  misc_feature 1..20: note = source = /note="Description of Artificial Sequence: Synthetic oligonucleotide"
  source 1..20: mol_type = other RNA
atttctcctagtgtagaagg

SEQ ID NO: 3714 - RNA, 20 nt, synthetic construct
  misc_feature 1..20: note = source = /note="Description of Artificial Sequence: Synthetic oligonucleotide"
  source 1..20: mol_type = other RNA
gcaatttctcctagtgtaga

SEQ ID NO: 3715 - RNA, 20 nt, synthetic construct
  misc_feature 1..20: note = source = /note="Description of Artificial Sequence: Synthetic oligonucleotide"
  source 1..20: mol_type = other RNA
atagcagatgttaaagatat

SEQ ID NO: 3716 - RNA, 20 nt, synthetic construct
  misc_feature 1..20: note = source = /note="Description of Artificial Sequence: Synthetic oligonucleotide"
  source 1..20: mol_type = other RNA
ttaaaaaaaaagaatgaaga

SEQ ID NO: 3717 - RNA, 20 nt, synthetic construct
  misc_feature 1..20: note = source = /note="Description of Artificial Sequence: Synthetic oligonucleotide"
  source 1..20: mol_type = other RNA
tttgagccagcaataacagc

SEQ ID NO: 3718 - RNA, 20 nt, synthetic construct
  misc_feature 1..20: note = source = /note="Description of Artificial Sequence: Synthetic oligonucleotide"
  source 1..20: mol_type = other RNA
aaataacactgaaatgctcc

SEQ ID NO: 3719 - RNA, 20 nt, synthetic construct
  misc_feature 1..20: note = source = /note="Description of Artificial Sequence: Synthetic oligonucleotide"
  source 1..20: mol_type = other RNA
gtctttaccttgagggtagt

SEQ ID NO: 3720 - RNA, 20 nt, synthetic construct
  misc_feature 1..20: note = source = /note="Description of Artificial Sequence: Synthetic oligonucleotide"
  source 1..20: mol_type = other RNA
gtgaaacttattttgtcttt

SEQ ID NO: 3721 - RNA, 20 nt, synthetic construct
  misc_feature 1..20: note = source = /note="Description of Artificial Sequence: Synthetic oligonucleotide"
  source 1..20: mol_type = other RNA
ggtccgtgacacgatctgtg

SEQ ID NO: 3722 - RNA, 20 nt, synthetic construct
  misc_feature 1..20: note = source = /note="Description of Artificial Sequence: Synthetic oligonucleotide"
  source 1..20: mol_type = other RNA
aatatccgaatattacacgg

SEQ ID NO: 3723 - RNA, 20 nt, synthetic construct
  misc_feature 1..20: note = source = /note="Description of Artificial Sequence: Synthetic oligonucleotide"
  source 1..20: mol_type = other RNA
taggtgatctatttgtaata

SEQ ID NO: 3724 - RNA, 20 nt, synthetic construct
  misc_feature 1..20: note = source = /note="Description of Artificial Sequence: Synthetic oligonucleotide"
  source 1..20: mol_type = other RNA
tgataattctttaatagtat

SEQ ID NO: 3725 - RNA, 20 nt, synthetic construct
  misc_feature 1..20: note = source = /note="Description of Artificial Sequence: Synthetic oligonucleotide"
  source 1..20: mol_type = other RNA
tgcacttcatttccttagca

SEQ ID NO: 3726 - RNA, 20 nt, synthetic construct
  misc_feature 1..20: note = source = /note="Description of Artificial Sequence: Synthetic oligonucleotide"
  source 1..20: mol_type = other RNA
ttcagaaagttctctatact

SEQ ID NO: 3727 - RNA, 20 nt, synthetic construct
  misc_feature 1..20: note = source = /note="Description of Artificial Sequence: Synthetic oligonucleotide"
  source 1..20: mol_type = other RNA
atggcctgtgttatcttatt

SEQ ID NO: 3728 - RNA, 20 nt, synthetic construct
  misc_feature 1..20: note = source = /note="Description of Artificial Sequence: Synthetic oligonucleotide"
  source 1..20: mol_type = other RNA
attttttaaagaacaaaaga

SEQ ID NO: 3729 - RNA, 20 nt, synthetic construct
  misc_feature 1..20: note = source = /note="Description of Artificial Sequence: Synthetic oligonucleotide"
  source 1..20: mol_type = other RNA
atctcagtaagttacactac

SEQ ID NO: 3730 - RNA, 20 nt, synthetic construct
  misc_feature 1..20: note = source = /note="Description of Artificial Sequence: Synthetic oligonucleotide"
  source 1..20: mol_type = other RNA
tagcatcaatacagaattta

SEQ ID NO: 3731 - RNA, 20 nt, synthetic construct
  misc_feature 1..20: note = source = /note="Description of Artificial Sequence: Synthetic oligonucleotide"
  source 1..20: mol_type = other RNA
gtagctcaagagttgcatct

SEQ ID NO: 3732 - RNA, 20 nt, synthetic construct
  misc_feature 1..20: note = source = /note="Description of Artificial Sequence: Synthetic oligonucleotide"
  source 1..20: mol_type = other RNA
gaccagcatcctttatcaag

SEQ ID NO: 3733 - RNA, 20 nt, synthetic construct
  misc_feature 1..20: note = source = /note="Description of Artificial Sequence: Synthetic oligonucleotide"
  source 1..20: mol_type = other RNA
caaacattacactggcagca

SEQ ID NO: 3734 - RNA, 20 nt, synthetic construct
  misc_feature 1..20: note = source = /note="Description of Artificial Sequence: Synthetic oligonucleotide"
  source 1..20: mol_type = other RNA
gcaaacattacactggcagc

SEQ ID NO: 3735 - RNA, 20 nt, synthetic construct
  misc_feature 1..20: note = source = /note="Description of Artificial Sequence: Synthetic oligonucleotide"
  source 1..20: mol_type = other RNA
taaatgagcaaacattacac

SEQ ID NO: 3736 - RNA, 20 nt, synthetic construct
  misc_feature 1..20: note = source = /note="Description of Artificial Sequence: Synthetic oligonucleotide"
  source 1..20: mol_type = other RNA
ttcaccttcttcaccatccc

SEQ ID NO: 3737 - RNA, 20 nt, synthetic construct
  misc_feature 1..20: note = source = /note="Description of Artificial Sequence: Synthetic oligonucleotide"
  source 1..20: mol_type = other RNA
agagaatagtctgtttctgt

SEQ ID NO: 3738 - RNA, 20 nt, synthetic construct
  misc_feature 1..20: note = source = /note="Description of Artificial Sequence: Synthetic oligonucleotide"
  source 1..20: mol_type = other RNA
tgaaaatgaataatgcaatc

SEQ ID NO: 3739 - RNA, 20 nt, synthetic construct
  misc_feature 1..20: note = source = /note="Description of Artificial Sequence: Synthetic oligonucleotide"
  source 1..20: mol_type = other RNA
cttccaaagcagataaaggc

SEQ ID NO: 3740 - RNA, 20 nt, synthetic construct
  misc_feature 1..20: note = source = /note="Description of Artificial Sequence: Synthetic oligonucleotide"
  source 1..20: mol_type = other RNA
taggcttccaaagcagataa

SEQ ID NO: 3741 - RNA, 20 nt, synthetic construct
  misc_feature 1..20: note = source = /note="Description of Artificial Sequence: Synthetic oligonucleotide"
  source 1..20: mol_type = other RNA
atcttggaagattaggaaat

SEQ ID NO: 3742 - RNA, 20 nt, synthetic construct
  misc_feature 1..20: note = source = /note="Description of Artificial Sequence: Synthetic oligonucleotide"
  source 1..20: mol_type = other RNA
atgataaatcttggaagatt

SEQ ID NO: 3743 - RNA, 20 nt, synthetic construct
  misc_feature 1..20: note = source = /note="Description of Artificial Sequence: Synthetic oligonucleotide"
  source 1..20: mol_type = other RNA
atgaaggtgatgataaatct

SEQ ID NO: 3744 - RNA, 20 nt, synthetic construct
  misc_feature 1..20: note = source = /note="Description of Artificial Sequence: Synthetic oligonucleotide"
  source 1..20: mol_type = other RNA
tgcatgctatggacatatga

SEQ ID NO: 3745 - RNA, 20 nt, synthetic construct
  misc_feature 1..20: note = source = /note="Description of Artificial Sequence: Synthetic oligonucleotide"
  source 1..20: mol_type = other RNA
tgtctgagaaatgcatgcta

SEQ ID NO: 3746 - RNA, 20 nt, synthetic construct
  misc_feature 1..20: note = source = /note="Description of Artificial Sequence: Synthetic oligonucleotide"
  source 1..20: mol_type = other RNA
cagtaccacatgaaaaacca

SEQ ID NO: 3747 - RNA, 20 nt, synthetic construct
  misc_feature 1..20: note = source = /note="Description of Artificial Sequence: Synthetic oligonucleotide"
  source 1..20: mol_type = other RNA
aaatatctacttctttgtca

SEQ ID NO: 3748 - RNA, 20 nt, synthetic construct
  misc_feature 1..20: note = source = /note="Description of Artificial Sequence: Synthetic oligonucleotide"
  source 1..20: mol_type = other RNA
cacagaatgaatagaacggg

SEQ ID NO: 3749 - RNA, 20 nt, synthetic construct
  misc_feature 1..20: note = source = /note="Description of Artificial Sequence: Synthetic oligonucleotide"
  source 1..20: mol_type = other RNA
cccagttgactatttattta

SEQ ID NO: 3750 - RNA, 20 nt, synthetic construct
  misc_feature 1..20: note = source = /note="Description of Artificial Sequence: Synthetic oligonucleotide"
  source 1..20: mol_type = other RNA
aattggaggtacaataagtt

SEQ ID NO: 3751 - RNA, 20 nt, synthetic construct
  misc_feature 1..20: note = source = /note="Description of Artificial Sequence: Synthetic oligonucleotide"
  source 1..20: mol_type = other RNA
gaattggaggtacaataagt

SEQ ID NO: 3752 - RNA, 20 nt, synthetic construct
  misc_feature 1..20: note = source = /note="Description of Artificial Sequence: Synthetic oligonucleotide"
  source 1..20: mol_type = other RNA
aaaaactgtcacgtccccca

SEQ ID NO: 3753 - RNA, 20 nt, synthetic construct
  misc_feature 1..20: note = source = /note="Description of Artificial Sequence: Synthetic oligonucleotide"
  source 1..20: mol_type = other RNA
acctaaaaactgtcacgtcc

SEQ ID NO: 3754 - RNA, 20 nt, synthetic construct
  misc_feature 1..20: note = source = /note="Description of Artificial Sequence: Synthetic oligonucleotide"
  source 1..20: mol_type = other RNA
cacctaaaaactgtcacgtc

SEQ ID NO: 3755 - RNA, 20 nt, synthetic construct
  misc_feature 1..20: note = source = /note="Description of Artificial Sequence: Synthetic oligonucleotide"
  source 1..20: mol_type = other RNA
acacctaaaaactgtcacgt

SEQ ID NO: 3756 - RNA, 20 nt, synthetic construct
  misc_feature 1..20: note = source = /note="Description of Artificial Sequence: Synthetic oligonucleotide"
  source 1..20: mol_type = other RNA
tacacctaaaaactgtcacg

SEQ ID NO: 3757 - RNA, 20 nt, synthetic construct
  misc_feature 1..20: note = source = /note="Description of Artificial Sequence: Synthetic oligonucleotide"
  source 1..20: mol_type = other RNA
cccctcagtttttaatgtac

SEQ ID NO: 3758 - RNA, 20 nt, synthetic construct
  misc_feature 1..20: note = source = /note="Description of Artificial Sequence: Synthetic oligonucleotide"
  source 1..20: mol_type = other RNA
ataatcatcaattcaaaaac

SEQ ID NO: 3759 - RNA, 20 nt, synthetic construct
  misc_feature 1..20: note = source = /note="Description of Artificial Sequence: Synthetic oligonucleotide"
  source 1..20: mol_type = other RNA
gataatcatcaattcaaaaa

SEQ ID NO: 3760 - RNA, 20 nt, synthetic construct
  misc_feature 1..20: note = source = /note="Description of Artificial Sequence: Synthetic oligonucleotide"
  source 1..20: mol_type = other RNA
cgataatcatcaattcaaaa

SEQ ID NO: 3761 - RNA, 20 nt, synthetic construct
  misc_feature 1..20: note = source = /note="Description of Artificial Sequence: Synthetic oligonucleotide"
  source 1..20: mol_type = other RNA
gtcccggaggtctgttgtcg

SEQ ID NO: 3762 - RNA, 20 nt, synthetic construct
  misc_feature 1..20: note = source = /note="Description of Artificial Sequence: Synthetic oligonucleotide"
  source 1..20: mol_type = other RNA
ttgacacacacaatagtcgt

SEQ ID NO: 3763 - RNA, 20 nt, synthetic construct
  misc_feature 1..20: note = source = /note="Description of Artificial Sequence: Synthetic oligonucleotide"
  source 1..20: mol_type = other RNA
gttgacacacacaatagtcg

SEQ ID NO: 3764 - RNA, 20 nt, synthetic construct
  misc_feature 1..20: note = source = /note="Description of Artificial Sequence: Synthetic oligonucleotide"
  source 1..20: mol_type = other RNA
tgagttccacttctgttgtt

SEQ ID NO: 3765 - RNA, 20 nt, synthetic construct
  misc_feature 1..20: note = source = /note="Description of Artificial Sequence: Synthetic oligonucleotide"
  source 1..20: mol_type = other RNA
ggagaagaagtcgtatgagt

SEQ ID NO: 3766 - RNA, 20 nt, synthetic construct
  misc_feature 1..20: note = source = /note="Description of Artificial Sequence: Synthetic oligonucleotide"
  source 1..20: mol_type = other RNA
agaaggtgaagacggtgggg

SEQ ID NO: 3767 - RNA, 20 nt, synthetic construct
  misc_feature 1..20: note = source = /note="Description of Artificial Sequence: Synthetic oligonucleotide"
  source 1..20: mol_type = other RNA
tttatgtccaaacttgacgt

SEQ ID NO: 3768 - RNA, 20 nt, synthetic construct
  misc_feature 1..20: note = source = /note="Description of Artificial Sequence: Synthetic oligonucleotide"
  source 1..20: mol_type = other RNA
tacccaactggaattttatg

SEQ ID NO: 3769 - RNA, 20 nt, synthetic construct
  misc_feature 1..20: note = source = /note="Description of Artificial Sequence: Synthetic oligonucleotide"
  source 1..20: mol_type = other RNA
ttcattgaaaaaaattaaca

SEQ ID NO: 3770 - RNA, 20 nt, synthetic construct
  misc_feature 1..20: note = source = /note="Description of Artificial Sequence: Synthetic oligonucleotide"
  source 1..20: mol_type = other RNA
taaacatacaggcatttgaa

SEQ ID NO: 3771 - RNA, 20 nt, synthetic construct
  misc_feature 1..20: note = source = /note="Description of Artificial Sequence: Synthetic oligonucleotide"
  source 1..20: mol_type = other RNA
aatgtttctcataaacatac

SEQ ID NO: 3772 - RNA, 20 nt, synthetic construct
  misc_feature 1..20: note = source = /note="Description of Artificial Sequence: Synthetic oligonucleotide"
  source 1..20: mol_type = other RNA
gagtagcagcatagccaact

SEQ ID NO: 3773 - RNA, 20 nt, synthetic construct
  misc_feature 1..20: note = source = /note="Description of Artificial Sequence: Synthetic oligonucleotide"
  source 1..20: mol_type = other RNA
ctaaagggatatttaaaatt

SEQ ID NO: 3774 - RNA, 20 nt, synthetic construct
  misc_feature 1..20: note = source = /note="Description of Artificial Sequence: Synthetic oligonucleotide"
  source 1..20: mol_type = other RNA
catattttctattctctaaa

SEQ ID NO: 3775 - RNA, 20 nt, synthetic construct
  misc_feature 1..20: note = source = /note="Description of Artificial Sequence: Synthetic oligonucleotide"
  source 1..20: mol_type = other RNA
tcatattttctattctctaa

SEQ ID NO: 3776 - RNA, 20 nt, synthetic construct
  misc_feature 1..20: note = source = /note="Description of Artificial Sequence: Synthetic oligonucleotide"
  source 1..20: mol_type = other RNA
agaaaatttatattgttgag

SEQ ID NO: 3777 - RNA, 20 nt, synthetic construct
  misc_feature 1..20: note = source = /note="Description of Artificial Sequence: Synthetic oligonucleotide"
  source 1..20: mol_type = other RNA
aaactttttatcctttgtgt

SEQ ID NO: 3778 - RNA, 20 nt, synthetic construct
  misc_feature 1..20: note = source = /note="Description of Artificial Sequence: Synthetic oligonucleotide"
  source 1..20: mol_type = other RNA
tcctcttagaaactaaggat

SEQ ID NO: 3779 - RNA, 20 nt, synthetic construct
  misc_feature 1..20: note = source = /note="Description of Artificial Sequence: Synthetic oligonucleotide"
  source 1..20: mol_type = other RNA
cattttcctcttagaaacta

SEQ ID NO: 3780 - RNA, 20 nt, synthetic construct
  misc_feature 1..20: note = source = /note="Description of Artificial Sequence: Synthetic oligonucleotide"
  source 1..20: mol_type = other RNA
ggtaactggcacacagcaga

SEQ ID NO: 3781 - RNA, 20 nt, synthetic construct
  misc_feature 1..20: note = source = /note="Description of Artificial Sequence: Synthetic oligonucleotide"
  source 1..20: mol_type = other RNA
gaacttatcgttttggtaac

SEQ ID NO: 3782 - RNA, 20 nt, synthetic construct
  misc_feature 1..20: note = source = /note="Description of Artificial Sequence: Synthetic oligonucleotide"
  source 1..20: mol_type = other RNA
tgagttggaacttatcgttt

SEQ ID NO: 3783 - RNA, 20 nt, synthetic construct
  misc_feature 1..20: note = source = /note="Description of Artificial Sequence: Synthetic oligonucleotide"
  source 1..20: mol_type = other RNA
tgtgggttggaagattgagt

SEQ ID NO: 3784 - RNA, 20 nt, synthetic construct
  misc_feature 1..20: note = source = /note="Description of Artificial Sequence: Synthetic oligonucleotide"
  source 1..20: mol_type = other RNA
agggtttcacggccctagtg

SEQ ID NO: 3785 - RNA, 20 nt, synthetic construct
  misc_feature 1..20: note = source = /note="Description of Artificial Sequence: Synthetic oligonucleotide"
  source 1..20: mol_type = other RNA
ggagccggagggtttcacgg

SEQ ID NO: 3786 - RNA, 20 nt, synthetic construct
  misc_feature 1..20: note = source = /note="Description of Artificial Sequence: Synthetic oligonucleotide"
  source 1..20: mol_type = other RNA
tggagccggagggtttcacg

SEQ ID NO: 3787 - RNA, 20 nt, synthetic construct
  misc_feature 1..20: note = source = /note="Description of Artificial Sequence: Synthetic oligonucleotide"
  source 1..20: mol_type = other RNA
tcgagcactagacgggtgga

SEQ ID NO: 3788 - RNA, 20 nt, synthetic construct
  misc_feature 1..20: note = source = /note="Description of Artificial Sequence: Synthetic oligonucleotide"
  source 1..20: mol_type = other RNA
aaagtggtataaccggtccg

SEQ ID NO: 3789 - RNA, 20 nt, synthetic construct
  misc_feature 1..20: note = source = /note="Description of Artificial Sequence: Synthetic oligonucleotide"
  source 1..20: mol_type = other RNA
cccaaaagtggtataaccgg

SEQ ID NO: 3790 - RNA, 20 nt, synthetic construct
  misc_feature 1..20: note = source = /note="Description of Artificial Sequence: Synthetic oligonucleotide"
  source 1..20: mol_type = other RNA
ctctgcccaaaagtggtata

SEQ ID NO: 3791 - RNA, 20 nt, synthetic construct
  misc_feature 1..20: note = source = /note="Description of Artificial Sequence: Synthetic oligonucleotide"
  source 1..20: mol_type = other RNA
aaacataaaaatcatctctg

SEQ ID NO: 3792 - RNA, 20 nt, synthetic construct
  misc_feature 1..20: note = source = /note="Description of Artificial Sequence: Synthetic oligonucleotide"
  source 1..20: mol_type = other RNA
aaaacataaaaatcatctct

SEQ ID NO: 3793 - RNA, 20 nt, synthetic construct
  misc_feature 1..20: note = source = /note="Description of Artificial Sequence: Synthetic oligonucleotide"
  source 1..20: mol_type = other RNA
gccctcgtgtggtggtacgg

SEQ ID NO: 3794 - RNA, 20 nt, synthetic construct
  misc_feature 1..20: note = source = /note="Description of Artificial Sequence: Synthetic oligonucleotide"
  source 1..20: mol_type = other RNA
tgccctcgtgtggtggtacg

SEQ ID NO: 3795 - RNA, 20 nt, synthetic construct
  misc_feature 1..20: note = source = /note="Description of Artificial Sequence: Synthetic oligonucleotide"
  source 1..20: mol_type = other RNA
agggttcatcgaccctgatg

SEQ ID NO: 3796 - RNA, 20 nt, synthetic construct
  misc_feature 1..20: note = source = /note="Description of Artificial Sequence: Synthetic oligonucleotide"
  source 1..20: mol_type = other RNA
gagggttcatcgaccctgat

SEQ ID NO: 3797 - RNA, 20 nt, synthetic construct
  misc_feature 1..20: note = source = /note="Description of Artificial Sequence: Synthetic oligonucleotide"
  source 1..20: mol_type = other RNA
ggagtcggagggttcatcga

SEQ ID NO: 3798 - RNA, 20 nt, synthetic construct
  misc_feature 1..20: note = source = /note="Description of Artificial Sequence: Synthetic oligonucleotide"
  source 1..20: mol_type = other RNA
cggagtcggagggttcatcg

SEQ ID NO: 3799 - RNA, 20 nt, synthetic construct
  misc_feature 1..20: note = source = /note="Description of Artificial Sequence: Synthetic oligonucleotide"
  source 1..20: mol_type = other RNA
gtgacgttggaggtggagga

SEQ ID NO: 3800 - RNA, 20 nt, synthetic construct
  misc_feature 1..20: note = source = /note="Description of Artificial Sequence: Synthetic oligonucleotide"
  source 1..20: mol_type = other RNA
agtgacgttggaggtggagg

SEQ ID NO: 3801 - RNA, 20 nt, synthetic construct
  misc_feature 1..20: note = source = /note="Description of Artificial Sequence: Synthetic oligonucleotide"
  source 1..20: mol_type = other RNA
cctcacgtcaccacgttaga

SEQ ID NO: 3802 - RNA, 20 nt, synthetic construct
  misc_feature 1..20: note = source = /note="Description of Artificial Sequence: Synthetic oligonucleotide"
  source 1..20: mol_type = other RNA
aacgggtccgacctcacgtc

SEQ ID NO: 3803 - RNA, 20 nt, synthetic construct
  misc_feature 1..20: note = source = /note="Description of Artificial Sequence: Synthetic oligonucleotide"
  source 1..20: mol_type = other RNA
agagggagaaaacgggtccg

SEQ ID NO: 3804 - RNA, 20 nt, synthetic construct
  misc_feature 1..20: note = source = /note="Description of Artificial Sequence: Synthetic oligonucleotide"
  source 1..20: mol_type = other RNA
tctcagagggagaaaacggg

SEQ ID NO: 3805 - RNA, 20 nt, synthetic construct
  misc_feature 1..20: note = source = /note="Description of Artificial Sequence: Synthetic oligonucleotide"
  source 1..20: mol_type = other RNA
tatttgaataaatgggttcc

SEQ ID NO: 3806 - RNA, 20 nt, synthetic construct
  misc_feature 1..20: note = source = /note="Description of Artificial Sequence: Synthetic oligonucleotide"
  source 1..20: mol_type = other RNA
taataaatatttgaataaat

SEQ ID NO: 3807 - RNA, 20 nt, synthetic construct
  misc_feature 1..20: note = source = /note="Description of Artificial Sequence: Synthetic oligonucleotide"
  source 1..20: mol_type = other RNA
gtaataaatatttgaataaa

SEQ ID NO: 3808 - RNA, 20 nt, synthetic construct
  misc_feature 1..20: note = source = /note="Description of Artificial Sequence: Synthetic oligonucleotide"
  source 1..20: mol_type = other RNA
ttatatgtcactttgttaac

SEQ ID NO: 3809 - RNA, 20 nt, synthetic construct
  misc_feature 1..20: note = source = /note="Description of Artificial Sequence: Synthetic oligonucleotide"
  source 1..20: mol_type = other RNA
tacatcatttttgcatgcat

SEQ ID NO: 3810 - RNA, 20 nt, synthetic construct
  misc_feature 1..20: note = source = /note="Description of Artificial Sequence: Synthetic oligonucleotide"
  source 1..20: mol_type = other RNA
atacatcatttttgcatgca

SEQ ID NO: 3811 - RNA, 20 nt, synthetic construct
  misc_feature 1..20: note = source = /note="Description of Artificial Sequence: Synthetic oligonucleotide"
  source 1..20: mol_type = other RNA
tatgttgatagggacagcta

SEQ ID NO: 3812 - RNA, 20 nt, synthetic construct
  misc_feature 1..20: note = source = /note="Description of Artificial Sequence: Synthetic oligonucleotide"
  source 1..20: mol_type = other RNA
tgttaatatatatgttgata

SEQ ID NO: 3813 - RNA, 20 nt, synthetic construct
  misc_feature 1..20: note = source = /note="Description of Artificial Sequence: Synthetic oligonucleotide"
  source 1..20: mol_type = other RNA
ttgttaatatatatgttgat

SEQ ID NO: 3814 - RNA, 20 nt, synthetic construct
  misc_feature 1..20: note = source = /note="Description of Artificial Sequence: Synthetic oligonucleotide"
  source 1..20: mol_type = other RNA
atagaacaaattgaggcttt

SEQ ID NO: 3815 - RNA, 20 nt, synthetic construct
  misc_feature 1..20: note = source = /note="Description of Artificial Sequence: Synthetic oligonucleotide"
  source 1..20: mol_type = other RNA
tatagaacaaattgaggctt

SEQ ID NO: 3816 - RNA, 20 nt, synthetic construct
  misc_feature 1..20: note = source = /note="Description of Artificial Sequence: Synthetic oligonucleotide"
  source 1..20: mol_type = other RNA
tatagctatagaacaaattg

SEQ ID NO: 3817 - RNA, 20 nt, synthetic construct
  misc_feature 1..20: note = source = /note="Description of Artificial Sequence: Synthetic oligonucleotide"
  source 1..20: mol_type = other RNA
gatctatcaaattaagggat

SEQ ID NO: 3818 - RNA, 20 nt, synthetic construct
  misc_feature 1..20: note = source = /note="Description of Artificial Sequence: Synthetic oligonucleotide"
  source 1..20: mol_type = other RNA
tttaagatctatcaaattaa

SEQ ID NO: 3819 - RNA, 20 nt, synthetic construct
  misc_feature 1..20: note = source = /note="Description of Artificial Sequence: Synthetic oligonucleotide"
  source 1..20: mol_type = other RNA
ttttaagatctatcaaatta

SEQ ID NO: 3820 - RNA, 20 nt, synthetic construct
  misc_feature 1..20: note = source = /note="Description of Artificial Sequence: Synthetic oligonucleotide"
  source 1..20: mol_type = other RNA
catagtctacttctcaaaaa

SEQ ID NO: 3821 - RNA, 20 nt, synthetic construct
  misc_feature 1..20: note = source = /note="Description of Artificial Sequence: Synthetic oligonucleotide"
  source 1..20: mol_type = other RNA
tcatagtctacttctcaaaa

SEQ ID NO: 3822 - RNA, 20 nt, synthetic construct
  misc_feature 1..20: note = source = /note="Description of Artificial Sequence: Synthetic oligonucleotide"
  source 1..20: mol_type = other RNA
taaatcttaggaaatactag

SEQ ID NO: 3823 - RNA, 20 nt, synthetic construct
  misc_feature 1..20: note = source = /note="Description of Artificial Sequence: Synthetic oligonucleotide"
  source 1..20: mol_type = other RNA
ttctattccaaataaatctt

SEQ ID NO: 3824 - RNA, 20 nt, synthetic construct
  misc_feature 1..20: note = source = /note="Description of Artificial Sequence: Synthetic oligonucleotide"
  source 1..20: mol_type = other RNA
aagagattataaactacgtc

SEQ ID NO: 3825 - RNA, 20 nt, synthetic construct
  misc_feature 1..20: note = source = /note="Description of Artificial Sequence: Synthetic oligonucleotide"
  source 1..20: mol_type = other RNA
gggtgtttttaaaaggaaca

SEQ ID NO: 3826 - RNA, 20 nt, synthetic construct
  misc_feature 1..20: note = source = /note="Description of Artificial Sequence: Synthetic oligonucleotide"
  source 1..20: mol_type = other RNA
gtacaaaaggatggaccgtg

SEQ ID NO: 3827 - RNA, 20 nt, synthetic construct
  misc_feature 1..20: note = source = /note="Description of Artificial Sequence: Synthetic oligonucleotide"
  source 1..20: mol_type = other RNA
tgtcaagtacaaaaggatgg

SEQ ID NO: 3828 - RNA, 20 nt, synthetic construct
  misc_feature 1..20: note = source = /note="Description of Artificial Sequence: Synthetic oligonucleotide"
  source 1..20: mol_type = other RNA
gaaggcattcactcaggagg

SEQ ID NO: 3829 - RNA, 20 nt, synthetic construct
  misc_feature 1..20: note = source = /note="Description of Artificial Sequence: Synthetic oligonucleotide"
  source 1..20: mol_type = other RNA
ccaatttgagtgttttcatg

SEQ ID NO: 3830 - RNA, 20 nt, synthetic construct
  misc_feature 1..20: note = source = /note="Description of Artificial Sequence: Synthetic oligonucleotide"
  source 1..20: mol_type = other RNA
cagtgacacttgtgaggacc

SEQ ID NO: 3831 - RNA, 20 nt, synthetic construct
  misc_feature 1..20: note = source = /note="Description of Artificial Sequence: Synthetic oligonucleotide"
  source 1..20: mol_type = other RNA
catcagtgacacttgtgagg

SEQ ID NO: 3832 - RNA, 20 nt, synthetic construct
  misc_feature 1..20: note = source = /note="Description of Artificial Sequence: Synthetic oligonucleotide"
  source 1..20: mol_type = other RNA
aaggaaaagaagaggggaat

SEQ ID NO: 3833 - RNA, 20 nt, synthetic construct
  misc_feature 1..20: note = source = /note="Description of Artificial Sequence: Synthetic oligonucleotide"
  source 1..20: mol_type = other RNA
caaggaaaagaagaggggaa

SEQ ID NO: 3834 - RNA, 20 nt, synthetic construct
  misc_feature 1..20: note = source = /note="Description of Artificial Sequence: Synthetic oligonucleotide"
  source 1..20: mol_type = other RNA
acgagactgtataaagttct

SEQ ID NO: 3835 - RNA, 20 nt, synthetic construct
  misc_feature 1..20: note = source = /note="Description of Artificial Sequence: Synthetic oligonucleotide"
  source 1..20: mol_type = other RNA
tttatcaaagtgaactctcg

SEQ ID NO: 3836 - RNA, 20 nt, synthetic construct
  misc_feature 1..20: note = source = /note="Description of Artificial Sequence: Synthetic oligonucleotide"
  source 1..20: mol_type = other RNA
ttagggttttcaaatccgag

SEQ ID NO: 3837 - RNA, 20 nt, synthetic construct
  misc_feature 1..20: note = source = /note="Description of Artificial Sequence: Synthetic oligonucleotide"
  source 1..20: mol_type = other RNA
aatattttagggttttcaaa

SEQ ID NO: 3838 - RNA, 20 nt, synthetic construct
  misc_feature 1..20: note = source = /note="Description of Artificial Sequence: Synthetic oligonucleotide"
  source 1..20: mol_type = other RNA
cataaagggaagggaaaccc

SEQ ID NO: 3839 - RNA, 20 nt, synthetic construct
  misc_feature 1..20: note = source = /note="Description of Artificial Sequence: Synthetic oligonucleotide"
  source 1..20: mol_type = other RNA
atccataaagggaagggaaa

SEQ ID NO: 3840 - RNA, 20 nt, synthetic construct
  misc_feature 1..20: note = source = /note="Description of Artificial Sequence: Synthetic oligonucleotide"
  source 1..20: mol_type = other RNA
aatccataaagggaagggaa

SEQ ID NO: 3841 - RNA, 20 nt, synthetic construct
  misc_feature 1..20: note = source = /note="Description of Artificial Sequence: Synthetic oligonucleotide"
  source 1..20: mol_type = other RNA
cgattttcccccgacttgaa

SEQ ID NO: 3842 - RNA, 20 nt, synthetic construct
  misc_feature 1..20: note = source = /note="Description of Artificial Sequence: Synthetic oligonucleotide"
  source 1..20: mol_type = other RNA
gatacacctttcgattttcc

SEQ ID NO: 3843 - RNA, 20 nt, synthetic construct
  misc_feature 1..20: note = source = /note="Description of Artificial Sequence: Synthetic oligonucleotide"
  source 1..20: mol_type = other RNA
ggatacacctttcgattttc

SEQ ID NO: 3844 - RNA, 20 nt, synthetic construct
  misc_feature 1..20: note = source = /note="Description of Artificial Sequence: Synthetic oligonucleotide"
  source 1..20: mol_type = other RNA
gggatacacctttcgatttt

SEQ ID NO: 3845 - RNA, 20 nt, synthetic construct
  misc_feature 1..20: note = source = /note="Description of Artificial Sequence: Synthetic oligonucleotide"
  source 1..20: mol_type = other RNA
agggatacacctttcgattt

SEQ ID NO: 3846 - RNA, 20 nt, synthetic construct
  misc_feature 1..20: note = source = /note="Description of Artificial Sequence: Synthetic oligonucleotide"
  source 1..20: mol_type = other RNA
atataaaaggaaagggatac

SEQ ID NO: 3847 - RNA, 20 nt, synthetic construct
  misc_feature 1..20: note = source = /note="Description of Artificial Sequence: Synthetic oligonucleotide"
  source 1..20: mol_type = other RNA
cgggggattgcacctgtcct

SEQ ID NO: 3848 - RNA, 20 nt, synthetic construct
  misc_feature 1..20: note = source = /note="Description of Artificial Sequence: Synthetic oligonucleotide"
  source 1..20: mol_type = other RNA
gatccgggggattgcacctg

SEQ ID NO: 3849 - RNA, 20 nt, synthetic construct
  misc_feature 1..20: note = source = /note="Description of Artificial Sequence: Synthetic oligonucleotide"
  source 1..20: mol_type = other RNA
aaggggatccgggggattgc

SEQ ID NO: 3850 - RNA, 20 nt, synthetic construct
  misc_feature 1..20: note = source = /note="Description of Artificial Sequence: Synthetic oligonucleotide"
  source 1..20: mol_type = other RNA
ggtcaaaagagtcaagggga

SEQ ID NO: 3851 - RNA, 20 nt, synthetic construct
  misc_feature 1..20: note = source = /note="Description of Artificial Sequence: Synthetic oligonucleotide"
  source 1..20: mol_type = other RNA
gaaaccactttgacatgggt

SEQ ID NO: 3852 - RNA, 20 nt, synthetic construct
  misc_feature 1..20: note = source = /note="Description of Artificial Sequence: Synthetic oligonucleotide"
  source 1..20: mol_type = other RNA
atattaaaccagagggagaa

SEQ ID NO: 3853 - RNA, 20 nt, synthetic construct
  misc_feature 1..20: note = source = /note="Description of Artificial Sequence: Synthetic oligonucleotide"
  source 1..20: mol_type = other RNA
gtaagacatcggaatattaa

SEQ ID NO: 3854 - RNA, 20 nt, synthetic construct
  misc_feature 1..20: note = source = /note="Description of Artificial Sequence: Synthetic oligonucleotide"
  source 1..20: mol_type = other RNA
tatcattttccacacccttt

SEQ ID NO: 3855 - RNA, 20 nt, synthetic construct
  misc_feature 1..20: note = source = /note="Description of Artificial Sequence: Synthetic oligonucleotide"
  source 1..20: mol_type = other RNA
ctatcattttccacaccctt

SEQ ID NO: 3856 - RNA, 20 nt, synthetic construct
  misc_feature 1..20: note = source = /note="Description of Artificial Sequence: Synthetic oligonucleotide"
  source 1..20: mol_type = other RNA
ttatactatcattttccaca

SEQ ID NO: 3857 - RNA, 20 nt, synthetic construct
  misc_feature 1..20: note = source = /note="Description of Artificial Sequence: Synthetic oligonucleotide"
  source 1..20: mol_type = other RNA
attatactatcattttccac

SEQ ID NO: 3858 - RNA, 20 nt, synthetic construct
  misc_feature 1..20: note = source = /note="Description of Artificial Sequence: Synthetic oligonucleotide"
  source 1..20: mol_type = other RNA
aaatcattatactatcattt

SEQ ID NO: 3859 - RNA, 20 nt, synthetic construct
  misc_feature 1..20: note = source = /note="Description of Artificial Sequence: Synthetic oligonucleotide"
  source 1..20: mol_type = other RNA
attttctttgacgacgttta

SEQ ID NO: 3860 - RNA, 20 nt, synthetic construct
  misc_feature 1..20: note = source = /note="Description of Artificial Sequence: Synthetic oligonucleotide"
  source 1..20: mol_type = other RNA
atcgtacggaatattaaaaa

SEQ ID NO: 3861 - RNA, 20 nt, synthetic construct
  misc_feature 1..20: note = source = /note="Description of Artificial Sequence: Synthetic oligonucleotide"
  source 1..20: mol_type = other RNA
tatcaaaaaatatttcaaag

SEQ ID NO: 3862 - RNA, 20 nt, synthetic construct
  misc_feature 1..20: note = source = /note="Description of Artificial Sequence: Synthetic oligonucleotide"
  source 1..20: mol_type = other RNA
actatgaaccgtaaagagaa

SEQ ID NO: 3863 - RNA, 20 nt, synthetic construct
  misc_feature 1..20: note = source = /note="Description of Artificial Sequence: Synthetic oligonucleotide"
  source 1..20: mol_type = other RNA
acatgtgatacgaactatga

SEQ ID NO: 3864 - RNA, 20 nt, synthetic construct
  misc_feature 1..20: note = source = /note="Description of Artificial Sequence: Synthetic oligonucleotide"
  source 1..20: mol_type = other RNA
ttgaagtttctaaaaaagga

SEQ ID NO: 3865 - RNA, 20 nt, synthetic construct
  misc_feature 1..20: note = source = /note="Description of Artificial Sequence: Synthetic oligonucleotide"
  source 1..20: mol_type = other RNA
accacagactgtaattaacc

SEQ ID NO: 3866 - RNA, 20 nt, synthetic construct
  misc_feature 1..20: note = source = /note="Description of Artificial Sequence: Synthetic oligonucleotide"
  source 1..20: mol_type = other RNA
aaccacagactgtaattaac

SEQ ID NO: 3867 - RNA, 20 nt, synthetic construct
  misc_feature 1..20: note = source = /note="Description of Artificial Sequence: Synthetic oligonucleotide"
  source 1..20: mol_type = other RNA
aaaccacagactgtaattaa

SEQ ID NO: 3868 - RNA, 20 nt, synthetic construct
  misc_feature 1..20: note = source = /note="Description of Artificial Sequence: Synthetic oligonucleotide"
  source 1..20: mol_type = other RNA
caaaccacagactgtaatta

SEQ ID NO: 3869 - RNA, 20 nt, synthetic construct
  misc_feature 1..20: note = source = /note="Description of Artificial Sequence: Synthetic oligonucleotide"
  source 1..20: mol_type = other RNA
tcgagagacctcttcatcaa

SEQ ID NO: 3870 - RNA, 20 nt, synthetic construct
  misc_feature 1..20: note = source = /note="Description of Artificial Sequence: Synthetic oligonucleotide"
  source 1..20: mol_type = other RNA
aaccacaagaaactcgagag

SEQ ID NO: 3871 - RNA, 20 nt, synthetic construct
  misc_feature 1..20: note = source = /note="Description of Artificial Sequence: Synthetic oligonucleotide"
  source 1..20: mol_type = other RNA
aaaccctgtaaataggacga

SEQ ID NO: 3872 - RNA, 20 nt, synthetic construct
  misc_feature 1..20: note = source = /note="Description of Artificial Sequence: Synthetic oligonucleotide"
  source 1..20: mol_type = other RNA
tatacgggtactcatcaaaa

SEQ ID NO: 3873 - RNA, 20 nt, synthetic construct
  misc_feature 1..20: note = source = /note="Description of Artificial Sequence: Synthetic oligonucleotide"
  source 1..20: mol_type = other RNA
ttatacgggtactcatcaaa

SEQ ID NO: 3874 - RNA, 20 nt, synthetic construct
  misc_feature 1..20: note = source = /note="Description of Artificial Sequence: Synthetic oligonucleotide"
  source 1..20: mol_type = other RNA
gatatccacaaaaaaggaag

SEQ ID NO: 3875 - RNA, 20 nt, synthetic construct
  misc_feature 1..20: note = source = /note="Description of Artificial Sequence: Synthetic oligonucleotide"
  source 1..20: mol_type = other RNA
ataataaaaacgaggagata

SEQ ID NO: 3876 - RNA, 20 nt, synthetic construct
  misc_feature 1..20: note = source = /note="Description of Artificial Sequence: Synthetic oligonucleotide"
  source 1..20: mol_type = other RNA
agaataaacataccaaatac

SEQ ID NO: 3877 - RNA, 20 nt, synthetic construct
  misc_feature 1..20: note = source = /note="Description of Artificial Sequence: Synthetic oligonucleotide"
  source 1..20: mol_type = other RNA
tgagatgagagaataaacat

SEQ ID NO: 3878 - RNA, 20 nt, synthetic construct
  misc_feature 1..20: note = source = /note="Description of Artificial Sequence: Synthetic oligonucleotide"
  source 1..20: mol_type = other RNA
ccaggtcttagcatgtgacg

SEQ ID NO: 3879 - RNA, 20 nt, synthetic construct
  misc_feature 1..20: note = source = /note="Description of Artificial Sequence: Synthetic oligonucleotide"
  source 1..20: mol_type = other RNA
aagacttcctgttaaaacgt

SEQ ID NO: 3880 - RNA, 20 nt, synthetic construct
  misc_feature 1..20: note = source = /note="Description of Artificial Sequence: Synthetic oligonucleotide"
  source 1..20: mol_type = other RNA
gaaataaagaattgaagact

SEQ ID NO: 3881 - RNA, 20 nt, synthetic construct
  misc_feature 1..20: note = source = /note="Description of Artificial Sequence: Synthetic oligonucleotide"
  source 1..20: mol_type = other RNA
aaaaacgttcccaccaggtg

SEQ ID NO: 3882 - RNA, 20 nt, synthetic construct
  misc_feature 1..20: note = source = /note="Description of Artificial Sequence: Synthetic oligonucleotide"
  source 1..20: mol_type = other RNA
aatttgtaaaaaacgttccc

SEQ ID NO: 3883 - RNA, 20 nt, synthetic construct
  misc_feature 1..20: note = source = /note="Description of Artificial Sequence: Synthetic oligonucleotide"
  source 1..20: mol_type = other RNA
tgaaatttgtaaaaaacgtt

SEQ ID NO: 3884 - RNA, 20 nt, synthetic construct
  misc_feature 1..20: note = source = /note="Description of Artificial Sequence: Synthetic oligonucleotide"
  source 1..20: mol_type = other RNA
ttgaaatttgtaaaaaacgt

SEQ ID NO: 3885 - RNA, 20 nt, synthetic construct
  misc_feature 1..20: note = source = /note="Description of Artificial Sequence: Synthetic oligonucleotide"
  source 1..20: mol_type = other RNA
gattaaaataaaaggaatac

SEQ ID NO: 3886 - RNA, 20 nt, synthetic construct
  misc_feature 1..20: note = source = /note="Description of Artificial Sequence: Synthetic oligonucleotide"
  source 1..20: mol_type = other RNA
cataaaagaaatagttcaac

SEQ ID NO: 3887 - RNA, 20 nt, synthetic construct
  misc_feature 1..20: note = source = /note="Description of Artificial Sequence: Synthetic oligonucleotide"
  source 1..20: mol_type = other RNA
acataaaagaaatagttcaa

SEQ ID NO: 3888 - RNA, 20 nt, synthetic construct
  misc_feature 1..20: note = source = /note="Description of Artificial Sequence: Synthetic oligonucleotide"
  source 1..20: mol_type = other RNA
cacataaaagaaatagttca

SEQ ID NO: 3889 - RNA, 20 nt, synthetic construct
  misc_feature 1..20: note = source = /note="Description of Artificial Sequence: Synthetic oligonucleotide"
  source 1..20: mol_type = other RNA
aattcatactacatttgaca

SEQ ID NO: 3890 - RNA, 20 nt, synthetic construct
  misc_feature 1..20: note = source = /note="Description of Artificial Sequence: Synthetic oligonucleotide"
  source 1..20: mol_type = other RNA
cagaacaagaactagaatcg

SEQ ID NO: 3891 - RNA, 20 nt, synthetic construct
  misc_feature 1..20: note = source = /note="Description of Artificial Sequence: Synthetic oligonucleotide"
  source 1..20: mol_type = other RNA
catcctttgtttcaccattc

SEQ ID NO: 3892 - RNA, 20 nt, synthetic construct
  misc_feature 1..20: note = source = /note="Description of Artificial Sequence: Synthetic oligonucleotide"
  source 1..20: mol_type = other RNA
tgaaggtcatcctttgtttc

SEQ ID NO: 3893 - RNA, 20 nt, synthetic construct
  misc_feature 1..20: note = source = /note="Description of Artificial Sequence: Synthetic oligonucleotide"
  source 1..20: mol_type = other RNA
gtaatccatcgtgaaggtca

SEQ ID NO: 3894 - RNA, 20 nt, synthetic construct
  misc_feature 1..20: note = source = /note="Description of Artificial Sequence: Synthetic oligonucleotide"
  source 1..20: mol_type = other RNA
aaggaaacagaataacgtaa

SEQ ID NO: 3895 - RNA, 20 nt, synthetic construct
  misc_feature 1..20: note = source = /note="Description of Artificial Sequence: Synthetic oligonucleotide"
  source 1..20: mol_type = other RNA
ctgtcaaactaaagaaggag

SEQ ID NO: 3896 - RNA, 20 nt, synthetic construct
  misc_feature 1..20: note = source = /note="Description of Artificial Sequence: Synthetic oligonucleotide"
  source 1..20: mol_type = other RNA
aaaagaaaaaagactaggaa

SEQ ID NO: 3897 - RNA, 20 nt, synthetic construct
  misc_feature 1..20: note = source = /note="Description of Artificial Sequence: Synthetic oligonucleotide"
  source 1..20: mol_type = other RNA
gaccatatgtcctttcacta

SEQ ID NO: 3898 - RNA, 20 nt, synthetic construct
  misc_feature 1..20: note = source = /note="Description of Artificial Sequence: Synthetic oligonucleotide"
  source 1..20: mol_type = other RNA
gaacaaataacgaccatatg

SEQ ID NO: 3899 - RNA, 20 nt, synthetic construct
  misc_feature 1..20: note = source = /note="Description of Artificial Sequence: Synthetic oligonucleotide"
  source 1..20: mol_type = other RNA
tttaatgtgaacaaataacg

SEQ ID NO: 3900 - RNA, 20 nt, synthetic construct
  misc_feature 1..20: note = source = /note="Description of Artificial Sequence: Synthetic oligonucleotide"
  source 1..20: mol_type = other RNA
agaaccccacgattacattt

SEQ ID NO: 3901 - RNA, 20 nt, synthetic construct
  misc_feature 1..20: note = source = /note="Description of Artificial Sequence: Synthetic oligonucleotide"
  source 1..20: mol_type = other RNA
gttttcataaagtaaagaac

SEQ ID NO: 3902 - RNA, 20 nt, synthetic construct
  misc_feature 1..20: note = source = /note="Description of Artificial Sequence: Synthetic oligonucleotide"
  source 1..20: mol_type = other RNA
tgttttcataaagtaaagaa

SEQ ID NO: 3903 - RNA, 20 nt, synthetic construct
  misc_feature 1..20: note = source = /note="Description of Artificial Sequence: Synthetic oligonucleotide"
  source 1..20: mol_type = other RNA
atgttttcataaagtaaaga

SEQ ID NO: 3904 - RNA, 20 nt, synthetic construct
  misc_feature 1..20: note = source = /note="Description of Artificial Sequence: Synthetic oligonucleotide"
  source 1..20: mol_type = other RNA
gagaagtaataaatcaagtg

SEQ ID NO: 3905 - RNA, 20 nt, synthetic construct
  misc_feature 1..20: note = source = /note="Description of Artificial Sequence: Synthetic oligonucleotide"
  source 1..20: mol_type = other RNA
gacttagatatctagttcaa

SEQ ID NO: 3906 - RNA, 20 nt, synthetic construct
  misc_feature 1..20: note = source = /note="Description of Artificial Sequence: Synthetic oligonucleotide"
  source 1..20: mol_type = other RNA
tgacttagatatctagttca

SEQ ID NO: 3907 - RNA, 20 nt, synthetic construct
  misc_feature 1..20: note = source = /note="Description of Artificial Sequence: Synthetic oligonucleotide"
  source 1..20: mol_type = other RNA
atagcacgacacaaaaaatt

SEQ ID NO: 3908 - RNA, 20 nt, synthetic construct
  misc_feature 1..20: note = source = /note="Description of Artificial Sequence: Synthetic oligonucleotide"
  source 1..20: mol_type = other RNA
caagaggagtttatgactca

SEQ ID NO: 3909 - RNA, 20 nt, synthetic construct
  misc_feature 1..20: note = source = /note="Description of Artificial Sequence: Synthetic oligonucleotide"
  source 1..20: mol_type = other RNA
aatatcattcgaaatttcgg

SEQ ID NO: 3910 - RNA, 20 nt, synthetic construct
  misc_feature 1..20: note = source = /note="Description of Artificial Sequence: Synthetic oligonucleotide"
  source 1..20: mol_type = other RNA
ccgagaaataagataaggta

SEQ ID NO: 3911 - RNA, 20 nt, synthetic construct
  misc_feature 1..20: note = source = /note="Description of Artificial Sequence: Synthetic oligonucleotide"
  source 1..20: mol_type = other RNA
tataaatgtacccaaacaaa

SEQ ID NO: 3912 - RNA, 20 nt, synthetic construct
  misc_feature 1..20: note = source = /note="Description of Artificial Sequence: Synthetic oligonucleotide"
  source 1..20: mol_type = other RNA
atataaatgtacccaaacaa

SEQ ID NO: 3913 - RNA, 20 nt, synthetic construct
  misc_feature 1..20: note = source = /note="Description of Artificial Sequence: Synthetic oligonucleotide"
  source 1..20: mol_type = other RNA
agtaaactaatataaatgta

SEQ ID NO: 3914 - RNA, 20 nt, synthetic construct
  misc_feature 1..20: note = source = /note="Description of Artificial Sequence: Synthetic oligonucleotide"
  source 1..20: mol_type = other RNA
tagtaaactaatataaatgt

SEQ ID NO: 3915 - RNA, 20 nt, synthetic construct
  misc_feature 1..20: note = source = /note="Description of Artificial Sequence: Synthetic oligonucleotide"
  source 1..20: mol_type = other RNA
tagacacaaatgtgagttaa

SEQ ID NO: 3916 - RNA, 20 nt, synthetic construct
  misc_feature 1..20: note = source = /note="Description of Artificial Sequence: Synthetic oligonucleotide"
  source 1..20: mol_type = other RNA
aagttcaattaaaaacgttt

SEQ ID NO: 3917 - RNA, 20 nt, synthetic construct
  misc_feature 1..20: note = source = /note="Description of Artificial Sequence: Synthetic oligonucleotide"
  source 1..20: mol_type = other RNA
taagttcaattaaaaacgtt

SEQ ID NO: 3918 - RNA, 20 nt, synthetic construct
  misc_feature 1..20: note = source = /note="Description of Artificial Sequence: Synthetic oligonucleotide"
  source 1..20: mol_type = other RNA
atcaagacgtaaaatgtaaa

SEQ ID NO: 3919 - RNA, 20 nt, synthetic construct
  misc_feature 1..20: note = source = /note="Description of Artificial Sequence: Synthetic oligonucleotide"
  source 1..20: mol_type = other RNA
aaaaaggacacaatagaaga

SEQ ID NO: 3920 - RNA, 20 nt, synthetic construct
  misc_feature 1..20: note = source = /note="Description of Artificial Sequence: Synthetic oligonucleotide"
  source 1..20: mol_type = other RNA
taaaaaggacacaatagaag

SEQ ID NO: 3921 - RNA, 20 nt, synthetic construct
  misc_feature 1..20: note = source = /note="Description of Artificial Sequence: Synthetic oligonucleotide"
  source 1..20: mol_type = other RNA
gacggtatggtttcagtaga

SEQ ID NO: 3922 - RNA, 20 nt, synthetic construct
  misc_feature 1..20: note = source = /note="Description of Artificial Sequence: Synthetic oligonucleotide"
  source 1..20: mol_type = other RNA
aggaagtacatagcacggaa

SEQ ID NO: 3923 - RNA, 20 nt, synthetic construct
  misc_feature 1..20: note = source = /note="Description of Artificial Sequence: Synthetic oligonucleotide"
  source 1..20: mol_type = other RNA
cgtttattaaaaaggtagac

SEQ ID NO: 3924 - RNA, 20 nt, synthetic construct
  misc_feature 1..20: note = source = /note="Description of Artificial Sequence: Synthetic oligonucleotide"
  source 1..20: mol_type = other RNA
gaaaccactcaacagacaag

SEQ ID NO: 3925 - RNA, 20 nt, synthetic construct
  misc_feature 1..20: note = source = /note="Description of Artificial Sequence: Synthetic oligonucleotide"
  source 1..20: mol_type = other RNA
actgtgaacacatagaagaa

SEQ ID NO: 3926 - RNA, 20 nt, synthetic construct
  misc_feature 1..20: note = source = /note="Description of Artificial Sequence: Synthetic oligonucleotide"
  source 1..20: mol_type = other RNA
ggtaagattgtccatacatc

SEQ ID NO: 3927 - RNA, 20 nt, synthetic construct
  misc_feature 1..20: note = source = /note="Description of Artificial Sequence: Synthetic oligonucleotide"
  source 1..20: mol_type = other RNA
gactgaagtcggtaagattg

SEQ ID NO: 3928 - RNA, 20 nt, synthetic construct
  misc_feature 1..20: note = source = /note="Description of Artificial Sequence: Synthetic oligonucleotide"
  source 1..20: mol_type = other RNA
aggtgtaagagtggtcgtga

SEQ ID NO: 3929 - RNA, 20 nt, synthetic construct
  misc_feature 1..20: note = source = /note="Description of Artificial Sequence: Synthetic oligonucleotide"
  source 1..20: mol_type = other RNA
aagaatggtcgttacttact

SEQ ID NO: 3930 - RNA, 20 nt, synthetic construct
  misc_feature 1..20: note = source = /note="Description of Artificial Sequence: Synthetic oligonucleotide"
  source 1..20: mol_type = other RNA
cgcgataacgacttagtata

SEQ ID NO: 3931 - RNA, 20 nt, synthetic construct
  misc_feature 1..20: note = source = /note="Description of Artificial Sequence: Synthetic oligonucleotide"
  source 1..20: mol_type = other RNA
tcgcgataacgacttagtat

SEQ ID NO: 3932 - RNA, 20 nt, synthetic construct
  misc_feature 1..20: note = source = /note="Description of Artificial Sequence: Synthetic oligonucleotide"
  source 1..20: mol_type = other RNA
ttcaaaagttcaggtatggt

SEQ ID NO: 3933 - RNA, 20 nt, synthetic construct
  misc_feature 1..20: note = source = /note="Description of Artificial Sequence: Synthetic oligonucleotide"
  source 1..20: mol_type = other RNA
cactcgatgacacgggccgg

SEQ ID NO: 3934 - RNA, 20 nt, synthetic construct
  misc_feature 1..20: note = source = /note="Description of Artificial Sequence: Synthetic oligonucleotide"
  source 1..20: mol_type = other RNA
gtccgcactcgatgacacgg

SEQ ID NO: 3935 - RNA, 20 nt, synthetic construct
  misc_feature 1..20: note = source = /note="Description of Artificial Sequence: Synthetic oligonucleotide"
  source 1..20: mol_type = other RNA
agggtttcacgacgttaatg

SEQ ID NO: 3936 - RNA, 20 nt, synthetic construct
  misc_feature 1..20: note = source = /note="Description of Artificial Sequence: Synthetic oligonucleotide"
  source 1..20: mol_type = other RNA
gagtttactaggtggacgga

SEQ ID NO: 3937 - RNA, 20 nt, synthetic construct
  misc_feature 1..20: note = source = /note="Description of Artificial Sequence: Synthetic oligonucleotide"
  source 1..20: mol_type = other RNA
ggagtttactaggtggacgg

SEQ ID NO: 3938 - RNA, 20 nt, synthetic construct
  misc_feature 1..20: note = source = /note="Description of Artificial Sequence: Synthetic oligonucleotide"
  source 1..20: mol_type = other RNA
tggtaccctaaagtggtccg

SEQ ID NO: 3939 - RNA, 20 nt, synthetic construct
  misc_feature 1..20: note = source = /note="Description of Artificial Sequence: Synthetic oligonucleotide"
  source 1..20: mol_type = other RNA
aaagtggtaccctaaagtgg

SEQ ID NO: 3940 - RNA, 20 nt, synthetic construct
  misc_feature 1..20: note = source = /note="Description of Artificial Sequence: Synthetic oligonucleotide"
  source 1..20: mol_type = other RNA
atctcgaccccaaagtggta

SEQ ID NO: 3941 - RNA, 20 nt, synthetic construct
  misc_feature 1..20: note = source = /note="Description of Artificial Sequence: Synthetic oligonucleotide"
  source 1..20: mol_type = other RNA
catctcgaccccaaagtggt

SEQ ID NO: 3942 - RNA, 20 nt, synthetic construct
  misc_feature 1..20: note = source = /note="Description of Artificial Sequence: Synthetic oligonucleotide"
  source 1..20: mol_type = other RNA
aacatagaaatcatctcgac

SEQ ID NO: 3943 - RNA, 20 nt, synthetic construct
  misc_feature 1..20: note = source = /note="Description of Artificial Sequence: Synthetic oligonucleotide"
  source 1..20: mol_type = other RNA
aaacatagaaatcatctcga

SEQ ID NO: 3944 - RNA, 20 nt, synthetic construct
  misc_feature 1..20: note = source = /note="Description of Artificial Sequence: Synthetic oligonucleotide"
  source 1..20: mol_type = other RNA
aaaacatagaaatcatctcg

SEQ ID NO: 3945 - RNA, 20 nt, synthetic construct
  misc_feature 1..20: note = source = /note="Description of Artificial Sequence: Synthetic oligonucleotide"
  source 1..20: mol_type = other RNA
agggatcatcgactctaatg

SEQ ID NO: 3946 - RNA, 20 nt, synthetic construct
  misc_feature 1..20: note = source = /note="Description of Artificial Sequence: Synthetic oligonucleotide"
  source 1..20: mol_type = other RNA
gtgacgttggaggcggagga

SEQ ID NO: 3947 - RNA, 20 nt, synthetic construct
  misc_feature 1..20: note = source = /note="Description of Artificial Sequence: Synthetic oligonucleotide"
  source 1..20: mol_type = other RNA
agtgacgttggaggcggagg

SEQ ID NO: 3948 - RNA, 20 nt, synthetic construct
  misc_feature 1..20: note = source = /note="Description of Artificial Sequence: Synthetic oligonucleotide"
  source 1..20: mol_type = other RNA
agtgagtccgacctcacgtt

SEQ ID NO: 3949 - RNA, 20 nt, synthetic construct
  misc_feature 1..20: note = source = /note="Description of Artificial Sequence: Synthetic oligonucleotide"
  source 1..20: mol_type = other RNA
aaaacgagacagtgagtccg

SEQ ID NO: 3950 - RNA, 20 nt, synthetic construct
  misc_feature 1..20: note = source = /note="Description of Artificial Sequence: Synthetic oligonucleotide"
  source 1..20: mol_type = other RNA
cctcaaaacgagacagtgag

SEQ ID NO: 3951 - RNA, 20 nt, synthetic construct
  misc_feature 1..20: note = source = /note="Description of Artificial Sequence: Synthetic oligonucleotide"
  source 1..20: mol_type = other RNA
aaaacgaaaaaaaaaactct

SEQ ID NO: 3952 - RNA, 20 nt, synthetic construct
  misc_feature 1..20: note = source = /note="Description of Artificial Sequence: Synthetic oligonucleotide"
  source 1..20: mol_type = other RNA
ttacacacgtccaaaaatac

SEQ ID NO: 3953 - RNA, 20 nt, synthetic construct
  misc_feature 1..20: note = source = /note="Description of Artificial Sequence: Synthetic oligonucleotide"
  source 1..20: mol_type = other RNA
tcgacaatttgttacacacg

SEQ ID NO: 3954 - RNA, 20 nt, synthetic construct
  misc_feature 1..20: note = source = /note="Description of Artificial Sequence: Synthetic oligonucleotide"
  source 1..20: mol_type = other RNA
agaactaacgtgggttcaaa

SEQ ID NO: 3955 - RNA, 20 nt, synthetic construct
  misc_feature 1..20: note = source = /note="Description of Artificial Sequence: Synthetic oligonucleotide"
  source 1..20: mol_type = other RNA
aaataggtgagtttataatt

SEQ ID NO: 3956 - RNA, 20 nt, synthetic construct
  misc_feature 1..20: note = source = /note="Description of Artificial Sequence: Synthetic oligonucleotide"
  source 1..20: mol_type = other RNA
gacttattataagaatgtag

SEQ ID NO: 3957 - RNA, 20 nt, synthetic construct
  misc_feature 1..20: note = source = /note="Description of Artificial Sequence: Synthetic oligonucleotide"
  source 1..20: mol_type = other RNA
gtatgtcataaatcggaaaa

SEQ ID NO: 3958 - RNA, 20 nt, synthetic construct
  misc_feature 1..20: note = source = /note="Description of Artificial Sequence: Synthetic oligonucleotide"
  source 1..20: mol_type = other RNA
aaaggccttacagtatatca

SEQ ID NO: 3959 - RNA, 20 nt, synthetic construct
  misc_feature 1..20: note = source = /note="Description of Artificial Sequence: Synthetic oligonucleotide"
  source 1..20: mol_type = other RNA
gaggtattaaaaccgaaaag

SEQ ID NO: 3960 - RNA, 20 nt, synthetic construct
  misc_feature 1..20: note = source = /note="Description of Artificial Sequence: Synthetic oligonucleotide"
  source 1..20: mol_type = other RNA
aaaatgacagaggtattaaa

SEQ ID NO: 3961 - RNA, 20 nt, synthetic construct
  misc_feature 1..20: note = source = /note="Description of Artificial Sequence: Synthetic oligonucleotide"
  source 1..20: mol_type = other RNA
acggatatgtaaggagggag

SEQ ID NO: 3962 - RNA, 20 nt, synthetic construct
  misc_feature 1..20: note = source = /note="Description of Artificial Sequence: Synthetic oligonucleotide"
  source 1..20: mol_type = other RNA
acctgtttacatattactgt

SEQ ID NO: 3963 - RNA, 20 nt, synthetic construct
  misc_feature 1..20: note = source = /note="Description of Artificial Sequence: Synthetic oligonucleotide"
  source 1..20: mol_type = other RNA
caccaatgtaggatgcacaa

SEQ ID NO: 3964 - RNA, 20 nt, synthetic construct
  misc_feature 1..20: note = source = /note="Description of Artificial Sequence: Synthetic oligonucleotide"
  source 1..20: mol_type = other RNA
tgtaatcccaagtgataacc

SEQ ID NO: 3965 - RNA, 20 nt, synthetic construct
  misc_feature 1..20: note = source = /note="Description of Artificial Sequence: Synthetic oligonucleotide"
  source 1..20: mol_type = other RNA
aaatgtaatcccaagtgata

SEQ ID NO: 3966 - RNA, 20 nt, synthetic construct
  misc_feature 1..20: note = source = /note="Description of Artificial Sequence: Synthetic oligonucleotide"
  source 1..20: mol_type = other RNA
tttggggtatcaaatgtaat

SEQ ID NO: 3967 - RNA, 20 nt, synthetic construct
  misc_feature 1..20: note = source = /note="Description of Artificial Sequence: Synthetic oligonucleotide"
  source 1..20: mol_type = other RNA
gtttggggtatcaaatgtaa

SEQ ID NO: 3968 - RNA, 20 nt, synthetic construct
  misc_feature 1..20: note = source = /note="Description of Artificial Sequence: Synthetic oligonucleotide"
  source 1..20: mol_type = other RNA
tagttgtagggtatggtctc

SEQ ID NO: 3969 - RNA, 20 nt, synthetic construct
  misc_feature 1..20: note = source = /note="Description of Artificial Sequence: Synthetic oligonucleotide"
  source 1..20: mol_type = other RNA
aataatatgaaattcaaaat

SEQ ID NO: 3970 - RNA, 20 nt, synthetic construct
  misc_feature 1..20: note = source = /note="Description of Artificial Sequence: Synthetic oligonucleotide"
  source 1..20: mol_type = other RNA
taataatatgaaattcaaaa

SEQ ID NO: 3971 - RNA, 20 nt, synthetic construct
  misc_feature 1..20: note = source = /note="Description of Artificial Sequence: Synthetic oligonucleotide"
  source 1..20: mol_type = other RNA
aaatatttaatgagtcagag

SEQ ID NO: 3972 - RNA, 20 nt, synthetic construct
  misc_feature 1..20: note = source = /note="Description of Artificial Sequence: Synthetic oligonucleotide"
  source 1..20: mol_type = other RNA
gactaccaaaatattcacaa

SEQ ID NO: 3973 - RNA, 20 nt, synthetic construct
  misc_feature 1..20: note = source = /note="Description of Artificial Sequence: Synthetic oligonucleotide"
  source 1..20: mol_type = other RNA
actcaagagtactctagact

SEQ ID NO: 3974 - RNA, 20 nt, synthetic construct
  misc_feature 1..20: note = source = /note="Description of Artificial Sequence: Synthetic oligonucleotide"
  source 1..20: mol_type = other RNA
gggtacgacaagagtagtat

SEQ ID NO: 3975 - RNA, 20 nt, synthetic construct
  misc_feature 1..20: note = source = /note="Description of Artificial Sequence: Synthetic oligonucleotide"
  source 1..20: mol_type = other RNA
ggggtacgacaagagtagta

SEQ ID NO: 3976 - RNA, 20 nt, synthetic construct
  misc_feature 1..20: note = source = /note="Description of Artificial Sequence: Synthetic oligonucleotide"
  source 1..20: mol_type = other RNA
accttcattaacctagtacc

SEQ ID NO: 3977 - RNA, 20 nt, synthetic construct
  misc_feature 1..20: note = source = /note="Description of Artificial Sequence: Synthetic oligonucleotide"
  source 1..20: mol_type = other RNA
caccttcattaacctagtac

SEQ ID NO: 3978 - RNA, 20 nt, synthetic construct
  misc_feature 1..20: note = source = /note="Description of Artificial Sequence: Synthetic oligonucleotide"
  source 1..20: mol_type = other RNA
ccaccttcattaacctagta

SEQ ID NO: 3979 - RNA, 20 nt, synthetic construct
  misc_feature 1..20: note = source = /note="Description of Artificial Sequence: Synthetic oligonucleotide"
  source 1..20: mol_type = other RNA
tccaccttcattaacctagt

SEQ ID NO: 3980 - RNA, 20 nt, synthetic construct
  misc_feature 1..20: note = source = /note="Description of Artificial Sequence: Synthetic oligonucleotide"
  source 1..20: mol_type = other RNA
tctctggtccaccttcatta

SEQ ID NO: 3981 - RNA, 20 nt, synthetic construct
  misc_feature 1..20: note = source = /note="Description of Artificial Sequence: Synthetic oligonucleotide"
  source 1..20: mol_type = other RNA
cacagttccgtctctggtcc

SEQ ID NO: 3982 - RNA, 20 nt, synthetic construct
  misc_feature 1..20: note = source = /note="Description of Artificial Sequence: Synthetic oligonucleotide"
  source 1..20: mol_type = other RNA
gtacacagttccgtctctgg

SEQ ID NO: 3983 - RNA, 20 nt, synthetic construct
  misc_feature 1..20: note = source = /note="Description of Artificial Sequence: Synthetic oligonucleotide"
  source 1..20: mol_type = other RNA
aggtattatgggtacacagt

SEQ ID NO: 3984 - RNA, 20 nt, synthetic construct
  misc_feature 1..20: note = source = /note="Description of Artificial Sequence: Synthetic oligonucleotide"
  source 1..20: mol_type = other RNA
gttttatcacactataccaa

SEQ ID NO: 3985 - RNA, 20 nt, synthetic construct
  misc_feature 1..20: note = source = /note="Description of Artificial Sequence: Synthetic oligonucleotide"
  source 1..20: mol_type = other RNA
acatagttttatcacactat

SEQ ID NO: 3986 - RNA, 20 nt, synthetic construct
  misc_feature 1..20: note = source = /note="Description of Artificial Sequence: Synthetic oligonucleotide"
  source 1..20: mol_type = other RNA
aaccagaaattggaaaatgg

SEQ ID NO: 3987 - RNA, 20 nt, synthetic construct
  misc_feature 1..20: note = source = /note="Description of Artificial Sequence: Synthetic oligonucleotide"
  source 1..20: mol_type = other RNA
cctaaccagaaattggaaaa

SEQ ID NO: 3988 - RNA, 20 nt, synthetic construct
  misc_feature 1..20: note = source = /note="Description of Artificial Sequence: Synthetic oligonucleotide"
  source 1..20: mol_type = other RNA
tatttttcctaaccagaaat

SEQ ID NO: 3989 - RNA, 20 nt, synthetic construct
  misc_feature 1..20: note = source = /note="Description of Artificial Sequence: Synthetic oligonucleotide"
  source 1..20: mol_type = other RNA
aggttgtgggtcaattaagg

SEQ ID NO: 3990 - RNA, 20 nt, synthetic construct
  misc_feature 1..20: note = source = /note="Description of Artificial Sequence: Synthetic oligonucleotide"
  source 1..20: mol_type = other RNA
acaaggttgtgggtcaatta

SEQ ID NO: 3991 - RNA, 20 nt, synthetic construct
  misc_feature 1..20: note = source = /note="Description of Artificial Sequence: Synthetic oligonucleotide"
  source 1..20: mol_type = other RNA
ttcattgcaaacaaggttgt

SEQ ID NO: 3992 - RNA, 20 nt, synthetic construct
  misc_feature 1..20: note = source = /note="Description of Artificial Sequence: Synthetic oligonucleotide"
  source 1..20: mol_type = other RNA
cttcattgcaaacaaggttg

SEQ ID NO: 3993 - RNA, 20 nt, synthetic construct
  misc_feature 1..20: note = source = /note="Description of Artificial Sequence: Synthetic oligonucleotide"
  source 1..20: mol_type = other RNA
ttgattcttcattgcaaaca

SEQ ID NO: 3994 - RNA, 20 nt, synthetic construct
  misc_feature 1..20: note = source = /note="Description of Artificial Sequence: Synthetic oligonucleotide"
  source 1..20: mol_type = other RNA
attatgcccatggacactca

SEQ ID NO: 3995 - RNA, 20 nt, synthetic construct
  misc_feature 1..20: note = source = /note="Description of Artificial Sequence: Synthetic oligonucleotide"
  source 1..20: mol_type = other RNA
aggcaactgaattatgccca

SEQ ID NO: 3996 - RNA, 20 nt, synthetic construct
  misc_feature 1..20: note = source = /note="Description of Artificial Sequence: Synthetic oligonucleotide"
  source 1..20: mol_type = other RNA
gtatcattggcattgaatga

SEQ ID NO: 3997 - RNA, 20 nt, synthetic construct
  misc_feature 1..20: note = source = /note="Description of Artificial Sequence: Synthetic oligonucleotide"
  source 1..20: mol_type = other RNA
tgtaggctttgcagtatcat

SEQ ID NO: 3998 - RNA, 20 nt, synthetic construct
  misc_feature 1..20: note = source = /note="Description of Artificial Sequence: Synthetic oligonucleotide"
  source 1..20: mol_type = other RNA
ggtacatgaatttgccttgt

SEQ ID NO: 3999 - RNA, 20 nt, synthetic construct
  misc_feature 1..20: note = source = /note="Description of Artificial Sequence: Synthetic oligonucleotide"
  source 1..20: mol_type = other RNA
aaaggatggagtctgtctgt

SEQ ID NO: 4000 - RNA, 20 nt, synthetic construct
  misc_feature 1..20: note = source = /note="Description of Artificial Sequence: Synthetic oligonucleotide"
  source 1..20: mol_type = other RNA
gaatagtttgagaaaaagga

SEQ ID NO: 4001 - RNA, 20 nt, synthetic construct
  misc_feature 1..20: note = source = /note="Description of Artificial Sequence: Synthetic oligonucleotide"
  source 1..20: mol_type = other RNA
tcttgaatagtttgagaaaa

SEQ ID NO: 4002 - RNA, 20 nt, synthetic construct
  misc_feature 1..20: note = source = /note="Description of Artificial Sequence: Synthetic oligonucleotide"
  source 1..20: mol_type = other RNA
tttcattttttgaggataga

SEQ ID NO: 4003 - RNA, 20 nt, synthetic construct
  misc_feature 1..20: note = source = /note="Description of Artificial Sequence: Synthetic oligonucleotide"
  source 1..20: mol_type = other RNA
aggatatttttcattttttg

SEQ ID NO: 4004 - RNA, 20 nt, synthetic construct
  misc_feature 1..20: note = source = /note="Description of Artificial Sequence: Synthetic oligonucleotide"
  source 1..20: mol_type = other RNA
cactcatttcccaaatgaag

SEQ ID NO: 4005 - RNA, 20 nt, synthetic construct
  misc_feature 1..20: note = source = /note="Description of Artificial Sequence: Synthetic oligonucleotide"
  source 1..20: mol_type = other RNA
attatcagaaagcaggtcag

SEQ ID NO: 4006 - RNA, 20 nt, synthetic construct
  misc_feature 1..20: note = source = /note="Description of Artificial Sequence: Synthetic oligonucleotide"
  source 1..20: mol_type = other RNA
gtcatgcattatcagaaagc

SEQ ID NO: 4007 - RNA, 20 nt, synthetic construct
  misc_feature 1..20: note = source = /note="Description of Artificial Sequence: Synthetic oligonucleotide"
  source 1..20: mol_type = other RNA
atacggtccagtcccatgtg

SEQ ID NO: 4008 - RNA, 20 nt, synthetic construct
  misc_feature 1..20: note = source = /note="Description of Artificial Sequence: Synthetic oligonucleotide"
  source 1..20: mol_type = other RNA
atcaccaaatacggtccagt

SEQ ID NO: 4009 - RNA, 20 nt, synthetic construct
  misc_feature 1..20: note = source = /note="Description of Artificial Sequence: Synthetic oligonucleotide"
  source 1..20: mol_type = other RNA
gatcaccaaatacggtccag

SEQ ID NO: 4010 - RNA, 20 nt, synthetic construct
  misc_feature 1..20: note = source = /note="Description of Artificial Sequence: Synthetic oligonucleotide"
  source 1..20: mol_type = other RNA
tatgagatcaccaaatacgg

SEQ ID NO: 4011 - RNA, 20 nt, synthetic construct
  misc_feature 1..20: note = source = /note="Description of Artificial Sequence: Synthetic oligonucleotide"
  source 1..20: mol_type = other RNA
ctttactgaattatgagatc

SEQ ID NO: 4012 - RNA, 20 nt, synthetic construct
  misc_feature 1..20: note = source = /note="Description of Artificial Sequence: Synthetic oligonucleotide"
  source 1..20: mol_type = other RNA
tgacatctatcagaaggtca

SEQ ID NO: 4013 - RNA, 20 nt, synthetic construct
  misc_feature 1..20: note = source = /note="Description of Artificial Sequence: Synthetic oligonucleotide"
  source 1..20: mol_type = other RNA
gtgacatctatcagaaggtc

SEQ ID NO: 4014 - RNA, 20 nt, synthetic construct
  misc_feature 1..20: note = source = /note="Description of Artificial Sequence: Synthetic oligonucleotide"
  source 1..20: mol_type = other RNA
taggaatgcagctgctttag

SEQ ID NO: 4015 - RNA, 20 nt, synthetic construct
  misc_feature 1..20: note = source = /note="Description of Artificial Sequence: Synthetic oligonucleotide"
  source 1..20: mol_type = other RNA
aaacttaatcatgcctcact

SEQ ID NO: 4016 - RNA, 20 nt, synthetic construct
  misc_feature 1..20: note = source = /note="Description of Artificial Sequence: Synthetic oligonucleotide"
  source 1..20: mol_type = other RNA
atactccagaacctaatagt

SEQ ID NO: 4017 - RNA, 20 nt, synthetic construct
  misc_feature 1..20: note = source = /note="Description of Artificial Sequence: Synthetic oligonucleotide"
  source 1..20: mol_type = other RNA
aatactccagaacctaatag

SEQ ID NO: 4018 - RNA, 20 nt, synthetic construct
  misc_feature 1..20: note = source = /note="Description of Artificial Sequence: Synthetic oligonucleotide"
  source 1..20: mol_type = other RNA
gctagaaaaactttcctctt

SEQ ID NO: 4019 - RNA, 20 nt, synthetic construct
  misc_feature 1..20: note = source = /note="Description of Artificial Sequence: Synthetic oligonucleotide"
  source 1..20: mol_type = other RNA
tgctagaaaaactttcctct

SEQ ID NO: 4020 - RNA, 20 nt, synthetic construct
  misc_feature 1..20: note = source = /note="Description of Artificial Sequence: Synthetic oligonucleotide"
  source 1..20: mol_type = other RNA
acaaatgaacaacccttagt

SEQ ID NO: 4021 - RNA, 20 nt, synthetic construct
  misc_feature 1..20: note = source = /note="Description of Artificial Sequence: Synthetic oligonucleotide"
  source 1..20: mol_type = other RNA
gaaaaaaaacagtgaaagaa

SEQ ID NO: 4022 - RNA, 20 nt, synthetic construct
  misc_feature 1..20: note = source = /note="Description of Artificial Sequence: Synthetic oligonucleotide"
  source 1..20: mol_type = other RNA
agaaaaaaaacagtgaaaga

SEQ ID NO: 4023 - RNA, 20 nt, synthetic construct
  misc_feature 1..20: note = source = /note="Description of Artificial Sequence: Synthetic oligonucleotide"
  source 1..20: mol_type = other RNA
caacagccagctgaccagaa

SEQ ID NO: 4024 - RNA, 20 nt, synthetic construct
  misc_feature 1..20: note = source = /note="Description of Artificial Sequence: Synthetic oligonucleotide"
  source 1..20: mol_type = other RNA
gaaagtgtcatttctatgat

SEQ ID NO: 4025 - RNA, 20 nt, synthetic construct
  misc_feature 1..20: note = source = /note="Description of Artificial Sequence: Synthetic oligonucleotide"
  source 1..20: mol_type = other RNA
atgagaaacaaagtgaaggc

SEQ ID NO: 4026 - RNA, 20 nt, synthetic construct
  misc_feature 1..20: note = source = /note="Description of Artificial Sequence: Synthetic oligonucleotide"
  source 1..20: mol_type = other RNA
ttggatgagaaacaaagtga

SEQ ID NO: 4027 - RNA, 20 nt, synthetic construct
  misc_feature 1..20: note = source = /note="Description of Artificial Sequence: Synthetic oligonucleotide"
  source 1..20: mol_type = other RNA
gaaagttttgtcattgattt

SEQ ID NO: 4028 - RNA, 20 nt, synthetic construct
  misc_feature 1..20: note = source = /note="Description of Artificial Sequence: Synthetic oligonucleotide"
  source 1..20: mol_type = other RNA
ccaagttgactcaggttcat

SEQ ID NO: 4029 - RNA, 20 nt, synthetic construct
  misc_feature 1..20: note = source = /note="Description of Artificial Sequence: Synthetic oligonucleotide"
  source 1..20: mol_type = other RNA
cctttatgccaagttgactc

SEQ ID NO: 4030 - RNA, 20 nt, synthetic construct
  misc_feature 1..20: note = source = /note="Description of Artificial Sequence: Synthetic oligonucleotide"
  source 1..20: mol_type = other RNA
tcactgagcaaagtggagtt

SEQ ID NO: 4031 - RNA, 20 nt, synthetic construct
  misc_feature 1..20: note = source = /note="Description of Artificial Sequence: Synthetic oligonucleotide"
  source 1..20: mol_type = other RNA
aatgttatcactgagcaaag

SEQ ID NO: 4032 - RNA, 20 nt, synthetic construct
  misc_feature 1..20: note = source = /note="Description of Artificial Sequence: Synthetic oligonucleotide"
  source 1..20: mol_type = other RNA
tgaggaagtatttttagact

SEQ ID NO: 4033 - RNA, 20 nt, synthetic construct
  misc_feature 1..20: note = source = /note="Description of Artificial Sequence: Synthetic oligonucleotide"
  source 1..20: mol_type = other RNA
gactgagattttggaatatg

SEQ ID NO: 4034 - RNA, 20 nt, synthetic construct
  misc_feature 1..20: note = source = /note="Description of Artificial Sequence: Synthetic oligonucleotide"
  source 1..20: mol_type = other RNA
tgtattaatgactgagattt

SEQ ID NO: 4035 - RNA, 20 nt, synthetic construct
  misc_feature 1..20: note = source = /note="Description of Artificial Sequence: Synthetic oligonucleotide"
  source 1..20: mol_type = other RNA
ctacaacagccgagaagcac

SEQ ID NO: 4036 - RNA, 20 nt, synthetic construct
  misc_feature 1..20: note = source = /note="Description of Artificial Sequence: Synthetic oligonucleotide"
  source 1..20: mol_type = other RNA
ataaacataattttgcttcc

SEQ ID NO: 4037 - RNA, 20 nt, synthetic construct
  misc_feature 1..20: note = source = /note="Description of Artificial Sequence: Synthetic oligonucleotide"
  source 1..20: mol_type = other RNA
agaatatttacgttttagaa

SEQ ID NO: 4038 - RNA, 20 nt, synthetic construct
  misc_feature 1..20: note = source = /note="Description of Artificial Sequence: Synthetic oligonucleotide"
  source 1..20: mol_type = other RNA
gtttgtgaccatggagatca

SEQ ID NO: 4039 - RNA, 20 nt, synthetic construct
  misc_feature 1..20: note = source = /note="Description of Artificial Sequence: Synthetic oligonucleotide"
  source 1..20: mol_type = other RNA
tgaaatactgtttgtgacca

SEQ ID NO: 4040 - RNA, 20 nt, synthetic construct
  misc_feature 1..20: note = source = /note="Description of Artificial Sequence: Synthetic oligonucleotide"
  source 1..20: mol_type = other RNA
tttttttttttttgataaaa

SEQ ID NO: 4041 - RNA, 20 nt, synthetic construct
  misc_feature 1..20: note = source = /note="Description of Artificial Sequence: Synthetic oligonucleotide"
  source 1..20: mol_type = other RNA
cacgaagacgtagggtcgga

SEQ ID NO: 4042 - RNA, 20 nt, synthetic construct
  misc_feature 1..20: note = source = /note="Description of Artificial Sequence: Synthetic oligonucleotide"
  source 1..20: mol_type = other RNA
gcacgaagacgtagggtcgg

SEQ ID NO: 4043 - RNA, 20 nt, synthetic construct
  misc_feature 1..20: note = source = /note="Description of Artificial Sequence: Synthetic oligonucleotide"
  source 1..20: mol_type = other RNA
tcctccacctccaacgtcac

SEQ ID NO: 4044 - RNA, 20 nt, synthetic construct
  misc_feature 1..20: note = source = /note="Description of Artificial Sequence: Synthetic oligonucleotide"
  source 1..20: mol_type = other RNA
gcgaacttgagtcctccacc

SEQ ID NO: 4045 - RNA, 20 nt, synthetic construct
  misc_feature 1..20: note = source = /note="Description of Artificial Sequence: Synthetic oligonucleotide"
  source 1..20: mol_type = other RNA
ttagcgaacttgagtcctcc

SEQ ID NO: 4046 - RNA, 20 nt, synthetic construct
  misc_feature 1..20: note = source = /note="Description of Artificial Sequence: Synthetic oligonucleotide"
  source 1..20: mol_type = other RNA
ctcttagcgaacttgagtcc

SEQ ID NO: 4047 - RNA, 20 nt, synthetic construct
  misc_feature 1..20: note = source = /note="Description of Artificial Sequence: Synthetic oligonucleotide"
  source 1..20: mol_type = other RNA
gtcctcttagcgaacttgag

SEQ ID NO: 4048 - RNA, 20 nt, synthetic construct
  misc_feature 1..20: note = source = /note="Description of Artificial Sequence: Synthetic oligonucleotide"
  source 1..20: mol_type = other RNA
cgatgggccgtccgactccg

SEQ ID NO: 4049 - RNA, 20 nt, synthetic construct
  misc_feature 1..20: note = source = /note="Description of Artificial Sequence: Synthetic oligonucleotide"
  source 1..20: mol_type = other RNA
agatcgatgggccgtccgac

SEQ ID NO: 4050 - RNA, 20 nt, synthetic construct
  misc_feature 1..20: note = source = /note="Description of Artificial Sequence: Synthetic oligonucleotide"
  source 1..20: mol_type = other RNA
acattaagatcgatgggccg

SEQ ID NO: 4051 - RNA, 20 nt, synthetic construct
  misc_feature 1..20: note = source = /note="Description of Artificial Sequence: Synthetic oligonucleotide"
  source 1..20: mol_type = other RNA
acggacattaagatcgatgg

SEQ ID NO: 4052 - RNA, 20 nt, synthetic construct
  misc_feature 1..20: note = source = /note="Description of Artificial Sequence: Synthetic oligonucleotide"
  source 1..20: mol_type = other RNA
tgtcttaatcggtccacacc

SEQ ID NO: 4053 - RNA, 20 nt, synthetic construct
  misc_feature 1..20: note = source = /note="Description of Artificial Sequence: Synthetic oligonucleotide"
  source 1..20: mol_type = other RNA
ttatgtcttaatcggtccac

SEQ ID NO: 4054 - RNA, 20 nt, synthetic construct
  misc_feature 1..20: note = source = /note="Description of Artificial Sequence: Synthetic oligonucleotide"
  source 1..20: mol_type = other RNA
gatttttatgtcttaatcgg

SEQ ID NO: 4055 - RNA, 20 nt, synthetic construct
  misc_feature 1..20: note = source = /note="Description of Artificial Sequence: Synthetic oligonucleotide"
  source 1..20: mol_type = other RNA
agtcctcaagttctggtcag

SEQ ID NO: 4056 - RNA, 20 nt, synthetic construct
  misc_feature 1..20: note = source = /note="Description of Artificial Sequence: Synthetic oligonucleotide"
  source 1..20: mol_type = other RNA
acccacctagtggactccag

SEQ ID NO: 4057 - RNA, 20 nt, synthetic construct
  misc_feature 1..20: note = source = /note="Description of Artificial Sequence: Synthetic oligonucleotide"
  source 1..20: mol_type = other RNA
acgccacccacctagtggac

SEQ ID NO: 4058 - RNA, 20 nt, synthetic construct
  misc_feature 1..20: note = source = /note="Description of Artificial Sequence: Synthetic oligonucleotide"
  source 1..20: mol_type = other RNA
gaaaccctccgacgccaccc

SEQ ID NO: 4059 - RNA, 20 nt, synthetic construct
  misc_feature 1..20: note = source = /note="Description of Artificial Sequence: Synthetic oligonucleotide"
  source 1..20: mol_type = other RNA
cgtgaaaccctccgacgcca

SEQ ID NO: 4060 - RNA, 20 nt, synthetic construct
  misc_feature 1..20: note = source = /note="Description of Artificial Sequence: Synthetic oligonucleotide"
  source 1..20: mol_type = other RNA
tcgtgaaaccctccgacgcc

SEQ ID NO: 4061 - RNA, 20 nt, synthetic construct
  misc_feature 1..20: note = source = /note="Description of Artificial Sequence: Synthetic oligonucleotide"
  source 1..20: mol_type = other RNA
aggtcgtgaaaccctccgac

SEQ ID NO: 4062 - RNA, 20 nt, synthetic construct
  misc_feature 1..20: note = source = /note="Description of Artificial Sequence: Synthetic oligonucleotide"
  source 1..20: mol_type = other RNA
acattaaggtcgtgaaaccc

SEQ ID NO: 4063 - RNA, 20 nt, synthetic construct
  misc_feature 1..20: note = source = /note="Description of Artificial Sequence: Synthetic oligonucleotide"
  source 1..20: mol_type = other RNA
cggacattaaggtcgtgaaa

SEQ ID NO: 4064 - RNA, 20 nt, synthetic construct
  misc_feature 1..20: note = source = /note="Description of Artificial Sequence: Synthetic oligonucleotide"
  source 1..20: mol_type = other RNA
gcggacattaaggtcgtgaa

SEQ ID NO: 4065 - RNA, 20 nt, synthetic construct
  misc_feature 1..20: note = source = /note="Description of Artificial Sequence: Synthetic oligonucleotide"
  source 1..20: mol_type = other RNA
gagttaaaagaaagataaaa

SEQ ID NO: 4066 - RNA, 20 nt, synthetic construct
  misc_feature 1..20: note = source = /note="Description of Artificial Sequence: Synthetic oligonucleotide"
  source 1..20: mol_type = other RNA
tgagttaaaagaaagataaa

SEQ ID NO: 4067 - RNA, 20 nt, synthetic construct
  misc_feature 1..20: note = source = /note="Description of Artificial Sequence: Synthetic oligonucleotide"
  source 1..20: mol_type = other RNA
cacatggagggatatatttg

SEQ ID NO: 4068 - RNA, 20 nt, synthetic construct
  misc_feature 1..20: note = source = /note="Description of Artificial Sequence: Synthetic oligonucleotide"
  source 1..20: mol_type = other RNA
ggaaggcaacttcacatgga

SEQ ID NO: 4069 - RNA, 20 nt, synthetic construct
  misc_feature 1..20: note = source = /note="Description of Artificial Sequence: Synthetic oligonucleotide"
  source 1..20: mol_type = other RNA
gggaaggcaacttcacatgg

SEQ ID NO: 4070 - RNA, 20 nt, synthetic construct
  misc_feature 1..20: note = source = /note="Description of Artificial Sequence: Synthetic oligonucleotide"
  source 1..20: mol_type = other RNA
ttagggaaggcaacttcaca

SEQ ID NO: 4071 - RNA, 20 nt, synthetic construct
  misc_feature 1..20: note = source = /note="Description of Artificial Sequence: Synthetic oligonucleotide"
  source 1..20: mol_type = other RNA
ggacagtacataattaggga

SEQ ID NO: 4072 - RNA, 20 nt, synthetic construct
  misc_feature 1..20: note = source = /note="Description of Artificial Sequence: Synthetic oligonucleotide"
  source 1..20: mol_type = other RNA
actaggacagtacataatta

SEQ ID NO: 4073 - RNA, 20 nt, synthetic construct
  misc_feature 1..20: note = source = /note="Description of Artificial Sequence: Synthetic oligonucleotide"
  source 1..20: mol_type = other RNA
aactaggacagtacataatt

SEQ ID NO: 4074 - RNA, 20 nt, synthetic construct
  misc_feature 1..20: note = source = /note="Description of Artificial Sequence: Synthetic oligonucleotide"
  source 1..20: mol_type = other RNA
caaggaatgaagattaaact

SEQ ID NO: 4075 - RNA, 20 nt, synthetic construct
  misc_feature 1..20: note = source = /note="Description of Artificial Sequence: Synthetic oligonucleotide"
  source 1..20: mol_type = other RNA
tggttttatagaggcaaaca

SEQ ID NO: 4076 - RNA, 20 nt, synthetic construct
  misc_feature 1..20: note = source = /note="Description of Artificial Sequence: Synthetic oligonucleotide"
  source 1..20: mol_type = other RNA
ttttaaacttggttttatag

SEQ ID NO: 4077 - RNA, 20 nt, synthetic construct
  misc_feature 1..20: note = source = /note="Description of Artificial Sequence: Synthetic oligonucleotide"
  source 1..20: mol_type = other RNA
tcagagactatttttaaact

SEQ ID NO: 4078 - RNA, 20 nt, synthetic construct
  misc_feature 1..20: note = source = /note="Description of Artificial Sequence: Synthetic oligonucleotide"
  source 1..20: mol_type = other RNA
tagtagaaactttgttacaa

SEQ ID NO: 4079 - RNA, 20 nt, synthetic construct
  misc_feature 1..20: note = source = /note="Description of Artificial Sequence: Synthetic oligonucleotide"
  source 1..20: mol_type = other RNA
atatagatcgtagctgagaa

SEQ ID NO: 4080 - RNA, 20 nt, synthetic construct
  misc_feature 1..20: note = source = /note="Description of Artificial Sequence: Synthetic oligonucleotide"
  source 1..20: mol_type = other RNA
tataacaaaagacatggcca

SEQ ID NO: 4081 - RNA, 20 nt, synthetic construct
  misc_feature 1..20: note = source = /note="Description of Artificial Sequence: Synthetic oligonucleotide"
  source 1..20: mol_type = other RNA
tgtgtgtataacaaaagaca

SEQ ID NO: 4082 - RNA, 20 nt, synthetic construct
  misc_feature 1..20: note = source = /note="Description of Artificial Sequence: Synthetic oligonucleotide"
  source 1..20: mol_type = other RNA
aaaagcatattgtgactaaa

SEQ ID NO: 4083 - RNA, 20 nt, synthetic construct
  misc_feature 1..20: note = source = /note="Description of Artificial Sequence: Synthetic oligonucleotide"
  source 1..20: mol_type = other RNA
atcaagaaattcccaggaaa

SEQ ID NO: 4084 - RNA, 20 nt, synthetic construct
  misc_feature 1..20: note = source = /note="Description of Artificial Sequence: Synthetic oligonucleotide"
  source 1..20: mol_type = other RNA
aaaatcatcaagaaattccc

SEQ ID NO: 4085 - RNA, 20 nt, synthetic construct
  misc_feature 1..20: note = source = /note="Description of Artificial Sequence: Synthetic oligonucleotide"
  source 1..20: mol_type = other RNA
gaaaagcactatttctgcag

SEQ ID NO: 4086 - RNA, 20 nt, synthetic construct
  misc_feature 1..20: note = source = /note="Description of Artificial Sequence: Synthetic oligonucleotide"
  source 1..20: mol_type = other RNA
tatcaccagctcttctaaga

SEQ ID NO: 4087 - RNA, 20 nt, synthetic construct
  misc_feature 1..20: note = source = /note="Description of Artificial Sequence: Synthetic oligonucleotide"
  source 1..20: mol_type = other RNA
aaccaagataaaagaagagt

SEQ ID NO: 4088 - RNA, 20 nt, synthetic construct
  misc_feature 1..20: note = source = /note="Description of Artificial Sequence: Synthetic oligonucleotide"
  source 1..20: mol_type = other RNA
ttgattgtcctgtgttaaaa

SEQ ID NO: 4089 - RNA, 20 nt, synthetic construct
  misc_feature 1..20: note = source = /note="Description of Artificial Sequence: Synthetic oligonucleotide"
  source 1..20: mol_type = other RNA
gttgattgtcctgtgttaaa

SEQ ID NO: 4090 - RNA, 20 nt, synthetic construct
  misc_feature 1..20: note = source = /note="Description of Artificial Sequence: Synthetic oligonucleotide"
  source 1..20: mol_type = other RNA
tatctgaatctaaagaaaga

SEQ ID NO: 4091 - RNA, 20 nt, synthetic construct
  misc_feature 1..20: note = source = /note="Description of Artificial Sequence: Synthetic oligonucleotide"
  source 1..20: mol_type = other RNA
ggggcaggggttacagatgt

SEQ ID NO: 4092 - RNA, 20 nt, synthetic construct
  misc_feature 1..20: note = source = /note="Description of Artificial Sequence: Synthetic oligonucleotide"
  source 1..20: mol_type = other RNA
gtaaaaaatatttggggcag

SEQ ID NO: 4093 - RNA, 20 nt, synthetic construct
  misc_feature 1..20: note = source = /note="Description of Artificial Sequence: Synthetic oligonucleotide"
  source 1..20: mol_type = other RNA
agtaaaaaatatttggggca

SEQ ID NO: 4094 - RNA, 20 nt, synthetic construct
  misc_feature 1..20: note = source = /note="Description of Artificial Sequence: Synthetic oligonucleotide"
  source 1..20: mol_type = other RNA
aagtaaaaaatatttggggc

SEQ ID NO: 4095 - RNA, 20 nt, synthetic construct
  misc_feature 1..20: note = source = /note="Description of Artificial Sequence: Synthetic oligonucleotide"
  source 1..20: mol_type = other RNA
gcataagtaaaaaatatttg

SEQ ID NO: 4096 - RNA, 20 nt, synthetic construct
  misc_feature 1..20: note = source = /note="Description of Artificial Sequence: Synthetic oligonucleotide"
  source 1..20: mol_type = other RNA
agcataagtaaaaaatattt

SEQ ID NO: 4097 - RNA, 20 nt, synthetic construct
  misc_feature 1..20: note = source = /note="Description of Artificial Sequence: Synthetic oligonucleotide"
  source 1..20: mol_type = other RNA
tagcataagtaaaaaatatt

SEQ ID NO: 4098 - RNA, 20 nt, synthetic construct
  misc_feature 1..20: note = source = /note="Description of Artificial Sequence: Synthetic oligonucleotide"
  source 1..20: mol_type = other RNA
catcttcgatttcctagaag

SEQ ID NO: 4099 - RNA, 20 nt, synthetic construct
  misc_feature 1..20: note = source = /note="Description of Artificial Sequence: Synthetic oligonucleotide"
  source 1..20: mol_type = other RNA
acatcttcgatttcctagaa

SEQ ID NO: 4100 - RNA, 20 nt, synthetic construct
  misc_feature 1..20: note = source = /note="Description of Artificial Sequence: Synthetic oligonucleotide"
  source 1..20: mol_type = other RNA
cacatcttcgatttcctaga

SEQ ID NO: 4101 - RNA, 20 nt, synthetic construct
  misc_feature 1..20: note = source = /note="Description of Artificial Sequence: Synthetic oligonucleotide"
  source 1..20: mol_type = other RNA
aactcattatcacattaaac

SEQ ID NO: 4102 - RNA, 20 nt, synthetic construct
  misc_feature 1..20: note = source = /note="Description of Artificial Sequence: Synthetic oligonucleotide"
  source 1..20: mol_type = other RNA
caatcatacttaaggttgga

SEQ ID NO: 4103 - RNA, 20 nt, synthetic construct
  misc_feature 1..20: note = source = /note="Description of Artificial Sequence: Synthetic oligonucleotide"
  source 1..20: mol_type = other RNA
tcaatcatacttaaggttgg

SEQ ID NO: 4104 - RNA, 20 nt, synthetic construct
  misc_feature 1..20: note = source = /note="Description of Artificial Sequence: Synthetic oligonucleotide"
  source 1..20: mol_type = other RNA
aattcaatcatacttaaggt

SEQ ID NO: 4105 - RNA, 20 nt, synthetic construct
  misc_feature 1..20: note = source = /note="Description of Artificial Sequence: Synthetic oligonucleotide"
  source 1..20: mol_type = other RNA
tataaattcaatcatactta

SEQ ID NO: 4106 - RNA, 20 nt, synthetic construct
  misc_feature 1..20: note = source = /note="Description of Artificial Sequence: Synthetic oligonucleotide"
  source 1..20: mol_type = other RNA
tatataaaaatgaaagtatg

SEQ ID NO: 4107 - RNA, 20 nt, synthetic construct
  misc_feature 1..20: note = source = /note="Description of Artificial Sequence: Synthetic oligonucleotide"
  source 1..20: mol_type = other RNA
tagccagagaacaaatgata

SEQ ID NO: 4108 - RNA, 20 nt, synthetic construct
  misc_feature 1..20: note = source = /note="Description of Artificial Sequence: Synthetic oligonucleotide"
  source 1..20: mol_type = other RNA
gtagccagagaacaaatgat

SEQ ID NO: 4109 - RNA, 20 nt, synthetic construct
  misc_feature 1..20: note = source = /note="Description of Artificial Sequence: Synthetic oligonucleotide"
  source 1..20: mol_type = other RNA
aaaaatgtaactattaactt

SEQ ID NO: 4110 - RNA, 20 nt, synthetic construct
  misc_feature 1..20: note = source = /note="Description of Artificial Sequence: Synthetic oligonucleotide"
  source 1..20: mol_type = other RNA
tgcaaattaccatttgtcac

SEQ ID NO: 4111 - RNA, 20 nt, synthetic construct
  misc_feature 1..20: note = source = /note="Description of Artificial Sequence: Synthetic oligonucleotide"
  source 1..20: mol_type = other RNA
tttgcatgattcttaaataa

SEQ ID NO: 4112 - RNA, 20 nt, synthetic construct
  misc_feature 1..20: note = source = /note="Description of Artificial Sequence: Synthetic oligonucleotide"
  source 1..20: mol_type = other RNA
gtttgcatgattcttaaata

SEQ ID NO: 4113 - RNA, 20 nt, synthetic construct
  misc_feature 1..20: note = source = /note="Description of Artificial Sequence: Synthetic oligonucleotide"
  source 1..20: mol_type = other RNA
cacctgctgcctatcagctc

SEQ ID NO: 4114 - RNA, 20 nt, synthetic construct
  misc_feature 1..20: note = source = /note="Description of Artificial Sequence: Synthetic oligonucleotide"
  source 1..20: mol_type = other RNA
agcagaattactagctacct

SEQ ID NO: 4115 - RNA, 20 nt, synthetic construct
  misc_feature 1..20: note = source = /note="Description of Artificial Sequence: Synthetic oligonucleotide"
  source 1..20: mol_type = other RNA
gaaggagctatagtggctta

SEQ ID NO: 4116 - RNA, 20 nt, synthetic construct
  misc_feature 1..20: note = source = /note="Description of Artificial Sequence: Synthetic oligonucleotide"
  source 1..20: mol_type = other RNA
ggaaggagctatagtggctt

SEQ ID NO: 4117 - RNA, 20 nt, synthetic construct
  misc_feature 1..20: note = source = /note="Description of Artificial Sequence: Synthetic oligonucleotide"
  source 1..20: mol_type = other RNA
taatggggaaggagctatag

SEQ ID NO: 4118 - RNA, 20 nt, synthetic construct
  misc_feature 1..20: note = source = /note="Description of Artificial Sequence: Synthetic oligonucleotide"
  source 1..20: mol_type = other RNA
gacccagggagtaatgggga

SEQ ID NO: 4119 - RNA, 20 nt, synthetic construct
  misc_feature 1..20: note = source = /note="Description of Artificial Sequence: Synthetic oligonucleotide"
  source 1..20: mol_type = other RNA
ggtagacccagggagtaatg

SEQ ID NO: 4120 - RNA, 20 nt, synthetic construct
  misc_feature 1..20: note = source = /note="Description of Artificial Sequence: Synthetic oligonucleotide"
  source 1..20: mol_type = other RNA
gggtagacccagggagtaat

SEQ ID NO: 4121 - RNA, 20 nt, synthetic construct
  misc_feature 1..20: note = source = /note="Description of Artificial Sequence: Synthetic oligonucleotide"
  source 1..20: mol_type = other RNA
tgggtagacccagggagtaa

SEQ ID NO: 4122 - RNA, 20 nt, synthetic construct
  misc_feature 1..20: note = source = /note="Description of Artificial Sequence: Synthetic oligonucleotide"
  source 1..20: mol_type = other RNA
caggatggtgggtagaccca

SEQ ID NO: 4123 - RNA, 20 nt, synthetic construct
  misc_feature 1..20: note = source = /note="Description of Artificial Sequence: Synthetic oligonucleotide"
  source 1..20: mol_type = other RNA
gcaggatggtgggtagaccc

SEQ ID NO: 4124 - RNA, 20 nt, synthetic construct
  misc_feature 1..20: note = source = /note="Description of Artificial Sequence: Synthetic oligonucleotide"
  source 1..20: mol_type = other RNA
tattctagctgcaggatggt

SEQ ID NO: 4125 - RNA, 20 nt, synthetic construct
  misc_feature 1..20: note = source = /note="Description of Artificial Sequence: Synthetic oligonucleotide"
  source 1..20: mol_type = other RNA
ttattctagctgcaggatgg

SEQ ID NO: 4126 - RNA, 20 nt, synthetic construct
  misc_feature 1..20: note = source = /note="Description of Artificial Sequence: Synthetic oligonucleotide"
  source 1..20: mol_type = other RNA
ttattattctagctgcagga

SEQ ID NO: 4127 - RNA, 20 nt, synthetic construct
  misc_feature 1..20: note = source = /note="Description of Artificial Sequence: Synthetic oligonucleotide"
  source 1..20: mol_type = other RNA
ccatttattattctagctgc

SEQ ID NO: 4128 - RNA, 20 nt, synthetic construct
  misc_feature 1..20: note = source = /note="Description of Artificial Sequence: Synthetic oligonucleotide"
  source 1..20: mol_type = other RNA
gtgctggaggaggatcctag

SEQ ID NO: 4129 - RNA, 20 nt, synthetic construct
  misc_feature 1..20: note = source = /note="Description of Artificial Sequence: Synthetic oligonucleotide"
  source 1..20: mol_type = other RNA
ttgagacatagtgctggagg

SEQ ID NO: 4130 - RNA, 20 nt, synthetic construct
  misc_feature 1..20: note = source = /note="Description of Artificial Sequence: Synthetic oligonucleotide"
  source 1..20: mol_type = other RNA
ccgttgagacatagtgctgg

SEQ ID NO: 4131 - RNA, 20 nt, synthetic construct
  misc_feature 1..20: note = source = /note="Description of Artificial Sequence: Synthetic oligonucleotide"
  source 1..20: mol_type = other RNA
ggtccgttgagacatagtgc

SEQ ID NO: 4132 - RNA, 20 nt, synthetic construct
  misc_feature 1..20: note = source = /note="Description of Artificial Sequence: Synthetic oligonucleotide"
  source 1..20: mol_type = other RNA
taaattgtcgagtatacagg

SEQ ID NO: 4133 - RNA, 20 nt, synthetic construct
  misc_feature 1..20: note = source = /note="Description of Artificial Sequence: Synthetic oligonucleotide"
  source 1..20: mol_type = other RNA
agacgtctcccttaccacag

SEQ ID NO: 4134 - RNA, 20 nt, synthetic construct
  misc_feature 1..20: note = source = /note="Description of Artificial Sequence: Synthetic oligonucleotide"
  source 1..20: mol_type = other RNA
aagtgtctacttttatcata

SEQ ID NO: 4135 - RNA, 20 nt, synthetic construct
  misc_feature 1..20: note = source = /note="Description of Artificial Sequence: Synthetic oligonucleotide"
  source 1..20: mol_type = other RNA
actctgcagttatgtttacc

SEQ ID NO: 4136 - RNA, 20 nt, synthetic construct
  misc_feature 1..20: note = source = /note="Description of Artificial Sequence: Synthetic oligonucleotide"
  source 1..20: mol_type = other RNA
ttaaagatttcaaaacgtat

SEQ ID NO: 4137 - RNA, 20 nt, synthetic construct
  misc_feature 1..20: note = source = /note="Description of Artificial Sequence: Synthetic oligonucleotide"
  source 1..20: mol_type = other RNA
ctaatctatttctaatagaa

SEQ ID NO: 4138 - RNA, 20 nt, synthetic construct
  misc_feature 1..20: note = source = /note="Description of Artificial Sequence: Synthetic oligonucleotide"
  source 1..20: mol_type = other RNA
tcattctaaaaattgaaaca

SEQ ID NO: 4139 - RNA, 20 nt, synthetic construct
  misc_feature 1..20: note = source = /note="Description of Artificial Sequence: Synthetic oligonucleotide"
  source 1..20: mol_type = other RNA
aattctaatgcttaatggga

SEQ ID NO: 4140 - RNA, 20 nt, synthetic construct
  misc_feature 1..20: note = source = /note="Description of Artificial Sequence: Synthetic oligonucleotide"
  source 1..20: mol_type = other RNA
taaaaattctaatgcttaat

SEQ ID NO: 4141 - RNA, 20 nt, synthetic construct
  misc_feature 1..20: note = source = /note="Description of Artificial Sequence: Synthetic oligonucleotide"
  source 1..20: mol_type = other RNA
ataaaaattctaatgcttaa

SEQ ID NO: 4142 - RNA, 20 nt, synthetic construct
  misc_feature 1..20: note = source = /note="Description of Artificial Sequence: Synthetic oligonucleotide"
  source 1..20: mol_type = other RNA
atcatgaatataaacatcaa

SEQ ID NO: 4143 - RNA, 20 nt, synthetic construct
  misc_feature 1..20: note = source = /note="Description of Artificial Sequence: Synthetic oligonucleotide"
  source 1..20: mol_type = other RNA
catatgacctatatgagcta

SEQ ID NO: 4144 - RNA, 20 nt, synthetic construct
  misc_feature 1..20: note = source = /note="Description of Artificial Sequence: Synthetic oligonucleotide"
  source 1..20: mol_type = other RNA
agcccaaatatcttcatcta

SEQ ID NO: 4145 - RNA, 20 nt, synthetic construct
  misc_feature 1..20: note = source = /note="Description of Artificial Sequence: Synthetic oligonucleotide"
  source 1..20: mol_type = other RNA
tacaatttcttcaaaatgga

SEQ ID NO: 4146 - RNA, 20 nt, synthetic construct
  misc_feature 1..20: note = source = /note="Description of Artificial Sequence: Synthetic oligonucleotide"
  source 1..20: mol_type = other RNA
accttacaatttcttcaaaa

SEQ ID NO: 4147 - RNA, 20 nt, synthetic construct
  misc_feature 1..20: note = source = /note="Description of Artificial Sequence: Synthetic oligonucleotide"
  source 1..20: mol_type = other RNA
attttggggggataagtatt

SEQ ID NO: 4148 - RNA, 20 nt, synthetic construct
  misc_feature 1..20: note = source = /note="Description of Artificial Sequence: Synthetic oligonucleotide"
  source 1..20: mol_type = other RNA
tttatttttcgtattttggg

SEQ ID NO: 4149 - RNA, 20 nt, synthetic construct
  misc_feature 1..20: note = source = /note="Description of Artificial Sequence: Synthetic oligonucleotide"
  source 1..20: mol_type = other RNA
ttttatttttcgtattttgg

SEQ ID NO: 4150 - RNA, 20 nt, synthetic construct
  misc_feature 1..20: note = source = /note="Description of Artificial Sequence: Synthetic oligonucleotide"
  source 1..20: mol_type = other RNA
attttatttttcgtattttg

SEQ ID NO: 4151 - RNA, 20 nt, synthetic construct
  misc_feature 1..20: note = source = /note="Description of Artificial Sequence: Synthetic oligonucleotide"
  source 1..20: mol_type = other RNA
gattttatttttcgtatttt

SEQ ID NO: 4152 - RNA, 20 nt, synthetic construct
  misc_feature 1..20: note = source = /note="Description of Artificial Sequence: Synthetic oligonucleotide"
  source 1..20: mol_type = other RNA
tgattttatttttcgtattt

SEQ ID NO: 4153 - RNA, 20 nt, synthetic construct
  misc_feature 1..20: note = source = /note="Description of Artificial Sequence: Synthetic oligonucleotide"
  source 1..20: mol_type = other RNA
cagattgaggatcaataaac

SEQ ID NO: 4154 - RNA, 20 nt, synthetic construct
  misc_feature 1..20: note = source = /note="Description of Artificial Sequence: Synthetic oligonucleotide"
  source 1..20: mol_type = other RNA
tttaaaacagccacagattg

SEQ ID NO: 4155 - RNA, 20 nt, synthetic construct
  misc_feature 1..20: note = source = /note="Description of Artificial Sequence: Synthetic oligonucleotide"
  source 1..20: mol_type = other RNA
gagtaatgagtctactacca

SEQ ID NO: 4156 - RNA, 20 nt, synthetic construct
  misc_feature 1..20: note = source = /note="Description of Artificial Sequence: Synthetic oligonucleotide"
  source 1..20: mol_type = other RNA
aaatgatgtaatggtttctg

SEQ ID NO: 4157 - RNA, 20 nt, synthetic construct
  misc_feature 1..20: note = source = /note="Description of Artificial Sequence: Synthetic oligonucleotide"
  source 1..20: mol_type = other RNA
aaaatgatgtaatggtttct

SEQ ID NO: 4158 - RNA, 20 nt, synthetic construct
  misc_feature 1..20: note = source = /note="Description of Artificial Sequence: Synthetic oligonucleotide"
  source 1..20: mol_type = other RNA
caaaatgatgtaatggtttc

SEQ ID NO: 4159 - RNA, 20 nt, synthetic construct
  misc_feature 1..20: note = source = /note="Description of Artificial Sequence: Synthetic oligonucleotide"
  source 1..20: mol_type = other RNA
aatattacaaaatgatgtaa

SEQ ID NO: 4160 - RNA, 20 nt, synthetic construct
  misc_feature 1..20: note = source = /note="Description of Artificial Sequence: Synthetic oligonucleotide"
  source 1..20: mol_type = other RNA
tgtgatattaagtttataaa

SEQ ID NO: 4161 - RNA, 20 nt, synthetic construct
  misc_feature 1..20: note = source = /note="Description of Artificial Sequence: Synthetic oligonucleotide"
  source 1..20: mol_type = other RNA
cacaagcaaaattatattaa

SEQ ID NO: 4162 - RNA, 20 nt, synthetic construct
  misc_feature 1..20: note = source = /note="Description of Artificial Sequence: Synthetic oligonucleotide"
  source 1..20: mol_type = other RNA
aaagagttattgaaatgaat

SEQ ID NO: 4163 - RNA, 20 nt, synthetic construct
  misc_feature 1..20: note = source = /note="Description of Artificial Sequence: Synthetic oligonucleotide"
  source 1..20: mol_type = other RNA
ttgagataaaaaatatatat

SEQ ID NO: 4164 - RNA, 20 nt, synthetic construct
  misc_feature 1..20: note = source = /note="Description of Artificial Sequence: Synthetic oligonucleotide"
  source 1..20: mol_type = other RNA
agacaaggttgggtcgaaat

SEQ ID NO: 4165 - RNA, 20 nt, synthetic construct
  misc_feature 1..20: note = source = /note="Description of Artificial Sequence: Synthetic oligonucleotide"
  source 1..20: mol_type = other RNA
ggctagtgaatccctttgac

SEQ ID NO: 4166 - RNA, 20 nt, synthetic construct
  misc_feature 1..20: note = source = /note="Description of Artificial Sequence: Synthetic oligonucleotide"
  source 1..20: mol_type = other RNA
ctagaactcggctagtgaat

SEQ ID NO: 4167 - RNA, 20 nt, synthetic construct
  misc_feature 1..20: note = source = /note="Description of Artificial Sequence: Synthetic oligonucleotide"
  source 1..20: mol_type = other RNA
actagaactcggctagtgaa

SEQ ID NO: 4168 - RNA, 20 nt, synthetic construct
  misc_feature 1..20: note = source = /note="Description of Artificial Sequence: Synthetic oligonucleotide"
  source 1..20: mol_type = other RNA
tgtttcatatttaattagaa

SEQ ID NO: 4169 - RNA, 20 nt, synthetic construct
  misc_feature 1..20: note = source = /note="Description of Artificial Sequence: Synthetic oligonucleotide"
  source 1..20: mol_type = other RNA
ttgtttcatatttaattaga

SEQ ID NO: 4170 - RNA, 20 nt, synthetic construct
  misc_feature 1..20: note = source = /note="Description of Artificial Sequence: Synthetic oligonucleotide"
  source 1..20: mol_type = other RNA
cacaggcaaactaagggggt

SEQ ID NO: 4171 - RNA, 20 nt, synthetic construct
  misc_feature 1..20: note = source = /note="Description of Artificial Sequence: Synthetic oligonucleotide"
  source 1..20: mol_type = other RNA
aacccacaggcaaactaagg

SEQ ID NO: 4172 - RNA, 20 nt, synthetic construct
  misc_feature 1..20: note = source = /note="Description of Artificial Sequence: Synthetic oligonucleotide"
  source 1..20: mol_type = other RNA
aaacccacaggcaaactaag

SEQ ID NO: 4173 - RNA, 20 nt, synthetic construct
  misc_feature 1..20: note = source = /note="Description of Artificial Sequence: Synthetic oligonucleotide"
  source 1..20: mol_type = other RNA
taaacccacaggcaaactaa

SEQ ID NO: 4174 - RNA, 20 nt, synthetic construct
  misc_feature 1..20: note = source = /note="Description of Artificial Sequence: Synthetic oligonucleotide"
  source 1..20: mol_type = other RNA
ataaacccacaggcaaacta

SEQ ID NO: 4175 - RNA, 20 nt, synthetic construct
  misc_feature 1..20: note = source = /note="Description of Artificial Sequence: Synthetic oligonucleotide"
  source 1..20: mol_type = other RNA
tgtaacttccataaacccac

SEQ ID NO: 4176 - RNA, 20 nt, synthetic construct
  misc_feature 1..20: note = source = /note="Description of Artificial Sequence: Synthetic oligonucleotide"
  source 1..20: mol_type = other RNA
caataattctattgggagct

SEQ ID NO: 4177 - RNA, 20 nt, synthetic construct
  misc_feature 1..20: note = source = /note="Description of Artificial Sequence: Synthetic oligonucleotide"
  source 1..20: mol_type = other RNA
tacagggcaataattctatt

SEQ ID NO: 4178 - RNA, 20 nt, synthetic construct
  misc_feature 1..20: note = source = /note="Description of Artificial Sequence: Synthetic oligonucleotide"
  source 1..20: mol_type = other RNA
ctacagggcaataattctat

SEQ ID NO: 4179 - RNA, 20 nt, synthetic construct
  misc_feature 1..20: note = source = /note="Description of Artificial Sequence: Synthetic oligonucleotide"
  source 1..20: mol_type = other RNA
tatttgcgcggctgactaca

SEQ ID NO: 4180 - RNA, 20 nt, synthetic construct
  misc_feature 1..20: note = source = /note="Description of Artificial Sequence: Synthetic oligonucleotide"
  source 1..20: mol_type = other RNA
gtatttgcgcggctgactac

SEQ ID NO: 4181 - RNA, 20 nt, synthetic construct
  misc_feature 1..20: note = source = /note="Description of Artificial Sequence: Synthetic oligonucleotide"
  source 1..20: mol_type = other RNA
tatttgtgattgtatttgcg

SEQ ID NO: 4182 - RNA, 20 nt, synthetic construct
  misc_feature 1..20: note = source = /note="Description of Artificial Sequence: Synthetic oligonucleotide"
  source 1..20: mol_type = other RNA
ttcttcacacaaggaacttc

SEQ ID NO: 4183 - RNA, 20 nt, synthetic construct
  misc_feature 1..20: note = source = /note="Description of Artificial Sequence: Synthetic oligonucleotide"
  source 1..20: mol_type = other RNA
attttctttttcttcacaca

SEQ ID NO: 4184 - RNA, 20 nt, synthetic construct
  misc_feature 1..20: note = source = /note="Description of Artificial Sequence: Synthetic oligonucleotide"
  source 1..20: mol_type = other RNA
gggaagaaaggggcaaagaa

SEQ ID NO: 4185 - RNA, 20 nt, synthetic construct
  misc_feature 1..20: note = source = /note="Description of Artificial Sequence: Synthetic oligonucleotide"
  source 1..20: mol_type = other RNA
ggagtgaaaggggaagaaag

SEQ ID NO: 4186 - RNA, 20 nt, synthetic construct
  misc_feature 1..20: note = source = /note="Description of Artificial Sequence: Synthetic oligonucleotide"
  source 1..20: mol_type = other RNA
aggagtgaaaggggaagaaa

SEQ ID NO: 4187 - RNA, 20 nt, synthetic construct
  misc_feature 1..20: note = source = /note="Description of Artificial Sequence: Synthetic oligonucleotide"
  source 1..20: mol_type = other RNA
aaggagtgaaaggggaagaa

SEQ ID NO: 4188 - RNA, 20 nt, synthetic construct
  misc_feature 1..20: note = source = /note="Description of Artificial Sequence: Synthetic oligonucleotide"
  source 1..20: mol_type = other RNA
ggagaagaaaggagtgaaag

SEQ ID NO: 4189 - RNA, 20 nt, synthetic construct
  misc_feature 1..20: note = source = /note="Description of Artificial Sequence: Synthetic oligonucleotide"
  source 1..20: mol_type = other RNA
aggagaagaaaggagtgaaa

SEQ ID NO: 4190 - RNA, 20 nt, synthetic construct
  misc_feature 1..20: note = source = /note="Description of Artificial Sequence: Synthetic oligonucleotide"
  source 1..20: mol_type = other RNA
taggagaagaaaggagtgaa

SEQ ID NO: 4191 - RNA, 20 nt, synthetic construct
  misc_feature 1..20: note = source = /note="Description of Artificial Sequence: Synthetic oligonucleotide"
  source 1..20: mol_type = other RNA
caagtagtataggagaagaa

SEQ ID NO: 4192 - RNA, 20 nt, synthetic construct
  misc_feature 1..20: note = source = /note="Description of Artificial Sequence: Synthetic oligonucleotide"
  source 1..20: mol_type = other RNA
ctagaaatttcaagtagtat

SEQ ID NO: 4193 - RNA, 20 nt, synthetic construct
  misc_feature 1..20: note = source = /note="Description of Artificial Sequence: Synthetic oligonucleotide"
  source 1..20: mol_type = other RNA
acttaccattcctaacatcc

SEQ ID NO: 4194 - RNA, 20 nt, synthetic construct
  misc_feature 1..20: note = source = /note="Description of Artificial Sequence: Synthetic oligonucleotide"
  source 1..20: mol_type = other RNA
tgaaaagcctcttaagggta

SEQ ID NO: 4195 - RNA, 20 nt, synthetic construct
  misc_feature 1..20: note = source = /note="Description of Artificial Sequence: Synthetic oligonucleotide"
  source 1..20: mol_type = other RNA
aactttgaaaagcctcttaa

SEQ ID NO: 4196 - RNA, 20 nt, synthetic construct
  misc_feature 1..20: note = source = /note="Description of Artificial Sequence: Synthetic oligonucleotide"
  source 1..20: mol_type = other RNA
taactttgaaaagcctctta

SEQ ID NO: 4197 - RNA, 20 nt, synthetic construct
  misc_feature 1..20: note = source = /note="Description of Artificial Sequence: Synthetic oligonucleotide"
  source 1..20: mol_type = other RNA
gtcagagactgggccaatga

SEQ ID NO: 4198 - RNA, 20 nt, synthetic construct
  misc_feature 1..20: note = source = /note="Description of Artificial Sequence: Synthetic oligonucleotide"
  source 1..20: mol_type = other RNA
gacctcactggtcagagact

SEQ ID NO: 4199 - RNA, 20 nt, synthetic construct
  misc_feature 1..20: note = source = /note="Description of Artificial Sequence: Synthetic oligonucleotide"
  source 1..20: mol_type = other RNA
tgacctcactggtcagagac

SEQ ID NO: 4200 - RNA, 20 nt, synthetic construct
  misc_feature 1..20: note = source = /note="Description of Artificial Sequence: Synthetic oligonucleotide"
  source 1..20: mol_type = other RNA
tggctaatacttgacctcac

SEQ ID NO: 4201 - RNA, 20 nt, synthetic construct
  misc_feature 1..20: note = source = /note="Description of Artificial Sequence: Synthetic oligonucleotide"
  source 1..20: mol_type = other RNA
ttttcacgacattctgacac

SEQ ID NO: 4202 - RNA, 20 nt, synthetic construct
  misc_feature 1..20: note = source = /note="Description of Artificial Sequence: Synthetic oligonucleotide"
  source 1..20: mol_type = other RNA
gatatttttaaaaaccaaga

SEQ ID NO: 4203 - RNA, 20 nt, synthetic construct
  misc_feature 1..20: note = source = /note="Description of Artificial Sequence: Synthetic oligonucleotide"
  source 1..20: mol_type = other RNA
aaaataaaaagaagttatga

SEQ ID NO: 4204 - RNA, 20 nt, synthetic construct
  misc_feature 1..20: note = source = /note="Description of Artificial Sequence: Synthetic oligonucleotide"
  source 1..20: mol_type = other RNA
gaaaataaaaagaagttatg

SEQ ID NO: 4205 - RNA, 20 nt, synthetic construct
  misc_feature 1..20: note = source = /note="Description of Artificial Sequence: Synthetic oligonucleotide"
  source 1..20: mol_type = other RNA
ggtacaggtataaattcaca

SEQ ID NO: 4206 - RNA, 20 nt, synthetic construct
  misc_feature 1..20: note = source = /note="Description of Artificial Sequence: Synthetic oligonucleotide"
  source 1..20: mol_type = other RNA
cactggaacatgagaggtac

SEQ ID NO: 4207 - RNA, 20 nt, synthetic construct
  misc_feature 1..20: note = source = /note="Description of Artificial Sequence: Synthetic oligonucleotide"
  source 1..20: mol_type = other RNA
accaaacactggaacatgag

SEQ ID NO: 4208 - RNA, 20 nt, synthetic construct
  misc_feature 1..20: note = source = /note="Description of Artificial Sequence: Synthetic oligonucleotide"
  source 1..20: mol_type = other RNA
attatttaagaaccaaacac

SEQ ID NO: 4209 - RNA, 20 nt, synthetic construct
  misc_feature 1..20: note = source = /note="Description of Artificial Sequence: Synthetic oligonucleotide"
  source 1..20: mol_type = other RNA
ataactacgatagccaaaca

SEQ ID NO: 4210 - RNA, 20 nt, synthetic construct
  misc_feature 1..20: note = source = /note="Description of Artificial Sequence: Synthetic oligonucleotide"
  source 1..20: mol_type = other RNA
aaacaagcatacaccatatg

SEQ ID NO: 4211 - RNA, 20 nt, synthetic construct
  misc_feature 1..20: note = source = /note="Description of Artificial Sequence: Synthetic oligonucleotide"
  source 1..20: mol_type = other RNA
tcctcctaacatagacaaag

SEQ ID NO: 4212 - RNA, 20 nt, synthetic construct
  misc_feature 1..20: note = source = /note="Description of Artificial Sequence: Synthetic oligonucleotide"
  source 1..20: mol_type = other RNA
tgtcagctacttggcagtga

SEQ ID NO: 4213 - RNA, 20 nt, synthetic construct
  misc_feature 1..20: note = source = /note="Description of Artificial Sequence: Synthetic oligonucleotide"
  source 1..20: mol_type = other RNA
atttcagaatgtcagctact

SEQ ID NO: 4214 - RNA, 20 nt, synthetic construct
  misc_feature 1..20: note = source = /note="Description of Artificial Sequence: Synthetic oligonucleotide"
  source 1..20: mol_type = other RNA
ccaactgtacagtgcctaaa

SEQ ID NO: 4215 - RNA, 20 nt, synthetic construct
  misc_feature 1..20: note = source = /note="Description of Artificial Sequence: Synthetic oligonucleotide"
  source 1..20: mol_type = other RNA
tccaactgtacagtgcctaa

SEQ ID NO: 4216 - RNA, 20 nt, synthetic construct
  misc_feature 1..20: note = source = /note="Description of Artificial Sequence: Synthetic oligonucleotide"
  source 1..20: mol_type = other RNA
agcacgttactcacctcagc

SEQ ID NO: 4217 - RNA, 20 nt, synthetic construct
  misc_feature 1..20: note = source = /note="Description of Artificial Sequence: Synthetic oligonucleotide"
  source 1..20: mol_type = other RNA
aggtttaaatgggatgagac

SEQ ID NO: 4218 - RNA, 20 nt, synthetic construct
  misc_feature 1..20: note = source = /note="Description of Artificial Sequence: Synthetic oligonucleotide"
  source 1..20: mol_type = other RNA
gttctcctccaggtttaaat

SEQ ID NO: 4219 - RNA, 20 nt, synthetic construct
  misc_feature 1..20: note = source = /note="Description of Artificial Sequence: Synthetic oligonucleotide"
  source 1..20: mol_type = other RNA
ggttctcctccaggtttaaa

SEQ ID NO: 4220 - RNA, 20 nt, synthetic construct
  misc_feature 1..20: note = source = /note="Description of Artificial Sequence: Synthetic oligonucleotide"
  source 1..20: mol_type = other RNA
gcttgatgtggttctcctcc

SEQ ID NO: 4221 - RNA, 20 nt, synthetic construct
  misc_feature 1..20: note = source = /note="Description of Artificial Sequence: Synthetic oligonucleotide"
  source 1..20: mol_type = other RNA
ggctgcttctgtgcttgatg

SEQ ID NO: 4222 - RNA, 20 nt, synthetic construct
  misc_feature 1..20: note = source = /note="Description of Artificial Sequence: Synthetic oligonucleotide"
  source 1..20: mol_type = other RNA
ttcctgttgaaatgctgctt

SEQ ID NO: 4223 - RNA, 20 nt, synthetic construct
  misc_feature 1..20: note = source = /note="Description of Artificial Sequence: Synthetic oligonucleotide"
  source 1..20: mol_type = other RNA
gtgatattagtacaccttca

SEQ ID NO: 4224 - RNA, 20 nt, synthetic construct
  misc_feature 1..20: note = source = /note="Description of Artificial Sequence: Synthetic oligonucleotide"
  source 1..20: mol_type = other RNA
aacacttccgttacaaaaaa

SEQ ID NO: 4225 - RNA, 20 nt, synthetic construct
  misc_feature 1..20: note = source = /note="Description of Artificial Sequence: Synthetic oligonucleotide"
  source 1..20: mol_type = other RNA
aaacacttccgttacaaaaa

SEQ ID NO: 4226 - RNA, 20 nt, synthetic construct
  misc_feature 1..20: note = source = /note="Description of Artificial Sequence: Synthetic oligonucleotide"
  source 1..20: mol_type = other RNA
atataagaatcctccatttg

SEQ ID NO: 4227 - RNA, 20 nt, synthetic construct
  misc_feature 1..20: note = source = /note="Description of Artificial Sequence: Synthetic oligonucleotide"
  source 1..20: mol_type = other RNA
tatataagaatcctccattt

SEQ ID NO: 4228 - RNA, 20 nt, synthetic construct
  misc_feature 1..20: note = source = /note="Description of Artificial Sequence: Synthetic oligonucleotide"
  source 1..20: mol_type = other RNA
ttatataagaatcctccatt

SEQ ID NO: 4229 - RNA, 20 nt, synthetic construct
  misc_feature 1..20: note = source = /note="Description of Artificial Sequence: Synthetic oligonucleotide"
  source 1..20: mol_type = other RNA
tgaatatatcattacaagct

SEQ ID NO: 4230 - RNA, 20 nt, synthetic construct
  misc_feature 1..20: note = source = /note="Description of Artificial Sequence: Synthetic oligonucleotide"
  source 1..20: mol_type = other RNA
aagttttcgttcaaaaatga

SEQ ID NO: 4231 - RNA, 20 nt, synthetic construct
  misc_feature 1..20: note = source = /note="Description of Artificial Sequence: Synthetic oligonucleotide"
  source 1..20: mol_type = other RNA
aaacatttcattttggggaa

SEQ ID NO: 4232 - RNA, 20 nt, synthetic construct
  misc_feature 1..20: note = source = /note="Description of Artificial Sequence: Synthetic oligonucleotide"
  source 1..20: mol_type = other RNA
cagtgaaacatttcattttg

SEQ ID NO: 4233 - RNA, 20 nt, synthetic construct
  misc_feature 1..20: note = source = /note="Description of Artificial Sequence: Synthetic oligonucleotide"
  source 1..20: mol_type = other RNA
tcagtgaaacatttcatttt

SEQ ID NO: 4234 - RNA, 20 nt, synthetic construct
  misc_feature 1..20: note = source = /note="Description of Artificial Sequence: Synthetic oligonucleotide"
  source 1..20: mol_type = other RNA
ttcagtgaaacatttcattt

SEQ ID NO: 4235 - RNA, 20 nt, synthetic construct
  misc_feature 1..20: note = source = /note="Description of Artificial Sequence: Synthetic oligonucleotide"
  source 1..20: mol_type = other RNA
catggcctccacaagcttgt

SEQ ID NO: 4236 - RNA, 20 nt, synthetic construct
  misc_feature 1..20: note = source = /note="Description of Artificial Sequence: Synthetic oligonucleotide"
  source 1..20: mol_type = other RNA
ctcttattcaacatgcttca

SEQ ID NO: 4237 - RNA, 20 nt, synthetic construct
  misc_feature 1..20: note = source = /note="Description of Artificial Sequence: Synthetic oligonucleotide"
  source 1..20: mol_type = other RNA
cacaccctttgtgggtggca

SEQ ID NO: 4238 - RNA, 20 nt, synthetic construct
  misc_feature 1..20: note = source = /note="Description of Artificial Sequence: Synthetic oligonucleotide"
  source 1..20: mol_type = other RNA
gcacaccctttgtgggtggc

SEQ ID NO: 4239 - RNA, 20 nt, synthetic construct
  misc_feature 1..20: note = source = /note="Description of Artificial Sequence: Synthetic oligonucleotide"
  source 1..20: mol_type = other RNA
cttagcacaccctttgtggg

SEQ ID NO: 4240 - RNA, 20 nt, synthetic construct
  misc_feature 1..20: note = source = /note="Description of Artificial Sequence: Synthetic oligonucleotide"
  source 1..20: mol_type = other RNA
taccttagcacaccctttgt

SEQ ID NO: 4241 - RNA, 20 nt, synthetic construct
  misc_feature 1..20: note = source = /note="Description of Artificial Sequence: Synthetic oligonucleotide"
  source 1..20: mol_type = other RNA
ttaccttagcacaccctttg

SEQ ID NO: 4242 - RNA, 20 nt, synthetic construct
  misc_feature 1..20: note = source = /note="Description of Artificial Sequence: Synthetic oligonucleotide"
  source 1..20: mol_type = other RNA
aatagctaaaatttattgaa

SEQ ID NO: 4243 - RNA, 20 nt, synthetic construct
  misc_feature 1..20: note = source = /note="Description of Artificial Sequence: Synthetic oligonucleotide"
  source 1..20: mol_type = other RNA
ccagtcactgtgttttagaa

SEQ ID NO: 4244 - RNA, 20 nt, synthetic construct
  misc_feature 1..20: note = source = /note="Description of Artificial Sequence: Synthetic oligonucleotide"
  source 1..20: mol_type = other RNA
gtccgtactcggtgacgcgg

SEQ ID NO: 4245 - RNA, 20 nt, synthetic construct
  misc_feature 1..20: note = source = /note="Description of Artificial Sequence: Synthetic oligonucleotide"
  source 1..20: mol_type = other RNA
aggctttcacgaccctaatg

SEQ ID NO: 4246 - RNA, 20 nt, synthetic construct
  misc_feature 1..20: note = source = /note="Description of Artificial Sequence: Synthetic oligonucleotide"
  source 1..20: mol_type = other RNA
ggagccggaggctttcacga

SEQ ID NO: 4247 - RNA, 20 nt, synthetic construct
  misc_feature 1..20: note = source = /note="Description of Artificial Sequence: Synthetic oligonucleotide"
  source 1..20: mol_type = other RNA
tggagccggaggctttcacg

SEQ ID NO: 4248 - RNA, 20 nt, synthetic construct
  misc_feature 1..20: note = source = /note="Description of Artificial Sequence: Synthetic oligonucleotide"
  source 1..20: mol_type = other RNA
tggagcactaggcgtatgga

SEQ ID NO: 4249 - RNA, 20 nt, synthetic construct
  misc_feature 1..20: note = source = /note="Description of Artificial Sequence: Synthetic oligonucleotide"
  source 1..20: mol_type = other RNA
aaagtggcacaatcggtcct

SEQ ID NO: 4250 - RNA, 20 nt, synthetic construct
  misc_feature 1..20: note = source = /note="Description of Artificial Sequence: Synthetic oligonucleotide"
  source 1..20: mol_type = other RNA
ccctaaagtggcacaatcgg

SEQ ID NO: 4251 - RNA, 20 nt, synthetic construct
  misc_feature 1..20: note = source = /note="Description of Artificial Sequence: Synthetic oligonucleotide"
  source 1..20: mol_type = other RNA
aaacataaaaatcatctctg

SEQ ID NO: 4252 - RNA, 20 nt, synthetic construct
  misc_feature 1..20: note = source = /note="Description of Artificial Sequence: Synthetic oligonucleotide"
  source 1..20: mol_type = other RNA
aaaacataaaaatcatctct

SEQ ID NO: 4253 - RNA, 20 nt, synthetic construct
  misc_feature 1..20: note = source = /note="Description of Artificial Sequence: Synthetic oligonucleotide"
  source 1..20: mol_type = other RNA
gtccgcgtacgggggtgcgg

SEQ ID NO: 4254 - RNA, 20 nt, synthetic construct
  misc_feature 1..20: note = source = /note="Description of Artificial Sequence: Synthetic oligonucleotide"
  source 1..20: mol_type = other RNA
aggactcatcgaccctaatg

SEQ ID NO: 4255 - RNA, 20 nt, synthetic construct
  misc_feature 1..20: note = source = /note="Description of Artificial Sequence: Synthetic oligonucleotide"
  source 1..20: mol_type = other RNA
ggagtcggaggactcatcga

SEQ ID NO: 4256 - RNA, 20 nt, synthetic construct
  misc_feature 1..20: note = source = /note="Description of Artificial Sequence: Synthetic oligonucleotide"
  source 1..20: mol_type = other RNA
cggagtcggaggactcatcg

SEQ ID NO: 4257 - RNA, 20 nt, synthetic construct
  misc_feature 1..20: note = source = /note="Description of Artificial Sequence: Synthetic oligonucleotide"
  source 1..20: mol_type = other RNA
gtgacgttcgaggcggaggg

SEQ ID NO: 4258 - RNA, 20 nt, synthetic construct
  misc_feature 1..20: note = source = /note="Description of Artificial Sequence: Synthetic oligonucleotide"
  source 1..20: mol_type = other RNA
cctcacgtcaccacgctaga

SEQ ID NO: 4259 - RNA, 20 nt, synthetic construct
  misc_feature 1..20: note = source = /note="Description of Artificial Sequence: Synthetic oligonucleotide"
  source 1..20: mol_type = other RNA
atcgggtccgacctcacgtc

SEQ ID NO: 4260 - RNA, 20 nt, synthetic construct
  misc_feature 1..20: note = source = /note="Description of Artificial Sequence: Synthetic oligonucleotide"
  source 1..20: mol_type = other RNA
agaacgagacatcgggtccg

SEQ ID NO: 4261 - RNA, 20 nt, synthetic construct
  misc_feature 1..20: note = source = /note="Description of Artificial Sequence: Synthetic oligonucleotide"
  source 1..20: mol_type = other RNA
tctcagaacgagacatcggg

SEQ ID NO: 4262 - RNA, 20 nt, synthetic construct
  misc_feature 1..20: note = source = /note="Description of Artificial Sequence: Synthetic oligonucleotide"
  source 1..20: mol_type = other RNA
aaggtttcacgaccctaatg

SEQ ID NO: 4263 - RNA, 20 nt, synthetic construct
  misc_feature 1..20: note = source = /note="Description of Artificial Sequence: Synthetic oligonucleotide"
  source 1..20: mol_type = other RNA
gcagttggaaggtttcacga

SEQ ID NO: 4264 - RNA, 20 nt, synthetic construct
  misc_feature 1..20: note = source = /note="Description of Artificial Sequence: Synthetic oligonucleotide"
  source 1..20: mol_type = other RNA
cgcagttggaaggtttcacg

SEQ ID NO: 4265 - RNA, 20 nt, synthetic construct
  misc_feature 1..20: note = source = /note="Description of Artificial Sequence: Synthetic oligonucleotide"
  source 1..20: mol_type = other RNA
agagtgatacaacgggtccg

SEQ ID NO: 4266 - RNA, 20 nt, synthetic construct
  misc_feature 1..20: note = source = /note="Description of Artificial Sequence: Synthetic oligonucleotide"
  source 1..20: mol_type = other RNA
ctccagagtgatacaacggg

SEQ ID NO: 4267 - RNA, 20 nt, synthetic construct
  misc_feature 1..20: note = source = /note="Description of Artificial Sequence: Synthetic oligonucleotide"
  source 1..20: mol_type = other RNA
caaataaaaaacatctctac

SEQ ID NO: 4268 - RNA, 20 nt, synthetic construct
  misc_feature 1..20: note = source = /note="Description of Artificial Sequence: Synthetic oligonucleotide"
  source 1..20: mol_type = other RNA
agggttcaccgatcctgatg

SEQ ID NO: 4269 - RNA, 20 nt, synthetic construct
  misc_feature 1..20: note = source = /note="Description of Artificial Sequence: Synthetic oligonucleotide"
  source 1..20: mol_type = other RNA
agagtcagagggttcaccga

SEQ ID NO: 4270 - RNA, 20 nt, synthetic construct
  misc_feature 1..20: note = source = /note="Description of Artificial Sequence: Synthetic oligonucleotide"
  source 1..20: mol_type = other RNA
aaggtagagtcagagggttc

SEQ ID NO: 4271 - RNA, 20 nt, synthetic construct
  misc_feature 1..20: note = source = /note="Description of Artificial Sequence: Synthetic oligonucleotide"
  source 1..20: mol_type = other RNA
gttcacgtcaccgtgctaga

SEQ ID NO: 4272 - RNA, 20 nt, synthetic construct
  misc_feature 1..20: note = source = /note="Description of Artificial Sequence: Synthetic oligonucleotide"
  source 1..20: mol_type = other RNA
agtgggtccgagttcacgtc

SEQ ID NO: 4273 - RNA, 20 nt, synthetic construct
  misc_feature 1..20: note = source = /note="Description of Artificial Sequence: Synthetic oligonucleotide"
  source 1..20: mol_type = other RNA
tcccagaacgagacagtggg

SEQ ID NO: 4274 - RNA, 20 nt, synthetic construct
  misc_feature 1..20: note = source = /note="Description of Artificial Sequence: Synthetic oligonucleotide"
  source 1..20: mol_type = other RNA
aacaaacaaaagaactctgt

SEQ ID NO: 4275 - RNA, 20 nt, synthetic construct
  misc_feature 1..20: note = source = /note="Description of Artificial Sequence: Synthetic oligonucleotide"
  source 1..20: mol_type = other RNA
aaacaaacaaaagaactctg

SEQ ID NO: 4276 - RNA, 20 nt, synthetic construct
  misc_feature 1..20: note = source = /note="Description of Artificial Sequence: Synthetic oligonucleotide"
  source 1..20: mol_type = other RNA
taagataagggccatgaagg

SEQ ID NO: 4277 - RNA, 20 nt, synthetic construct
  misc_feature 1..20: note = source = /note="Description of Artificial Sequence: Synthetic oligonucleotide"
  source 1..20: mol_type = other RNA
ttaagataagggccatgaag

SEQ ID NO: 4278 - RNA, 20 nt, synthetic construct
  misc_feature 1..20: note = source = /note="Description of Artificial Sequence: Synthetic oligonucleotide"
  source 1..20: mol_type = other RNA
gttaagataagggccatgaa

SEQ ID NO: 4279 - RNA, 20 nt, synthetic construct
  misc_feature 1..20: note = source = /note="Description of Artificial Sequence: Synthetic oligonucleotide"
  source 1..20: mol_type = other RNA
ggttaagataagggccatga

SEQ ID NO: 4280 - RNA, 20 nt, synthetic construct
  misc_feature 1..20: note = source = /note="Description of Artificial Sequence: Synthetic oligonucleotide"
  source 1..20: mol_type = other RNA
gaagacagaggttaagataa

SEQ ID NO: 4281 - RNA, 20 nt, synthetic construct
  misc_feature 1..20: note = source = /note="Description of Artificial Sequence: Synthetic oligonucleotide"
  source 1..20: mol_type = other RNA
tgaagacagaggttaagata

SEQ ID NO: 4282 - RNA, 20 nt, synthetic construct
  misc_feature 1..20: note = source = /note="Description of Artificial Sequence: Synthetic oligonucleotide"
  source 1..20: mol_type = other RNA
aagggtagtgctgaagacag

SEQ ID NO: 4283 - RNA, 20 nt, synthetic construct
  misc_feature 1..20: note = source = /note="Description of Artificial Sequence: Synthetic oligonucleotide"
  source 1..20: mol_type = other RNA
aaacggaacaaacatatgaa

SEQ ID NO: 4284 - RNA, 20 nt, synthetic construct
  misc_feature 1..20: note = source = /note="Description of Artificial Sequence: Synthetic oligonucleotide"
  source 1..20: mol_type = other RNA
aaaacggaacaaacatatga

SEQ ID NO: 4285 - RNA, 20 nt, synthetic construct
  misc_feature 1..20: note = source = /note="Description of Artificial Sequence: Synthetic oligonucleotide"
  source 1..20: mol_type = other RNA
aaatcacttagaagataaaa

SEQ ID NO: 4286 - RNA, 20 nt, synthetic construct
  misc_feature 1..20: note = source = /note="Description of Artificial Sequence: Synthetic oligonucleotide"
  source 1..20: mol_type = other RNA
cgtggtgacgtgaggtcgga

SEQ ID NO: 4287 - RNA, 20 nt, synthetic construct
  misc_feature 1..20: note = source = /note="Description of Artificial Sequence: Synthetic oligonucleotide"
  source 1..20: mol_type = other RNA
gcgtggtgacgtgaggtcgg

SEQ ID NO: 4288 - RNA, 20 nt, synthetic construct
  misc_feature 1..20: note = source = /note="Description of Artificial Sequence: Synthetic oligonucleotide"
  source 1..20: mol_type = other RNA
cttagcggaggtcctccgcc

SEQ ID NO: 4289 - RNA, 20 nt, synthetic construct
  misc_feature 1..20: note = source = /note="Description of Artificial Sequence: Synthetic oligonucleotide"
  source 1..20: mol_type = other RNA
cctcttagcggaggtcctcc

SEQ ID NO: 4290 - RNA, 20 nt, synthetic construct
  misc_feature 1..20: note = source = /note="Description of Artificial Sequence: Synthetic oligonucleotide"
  source 1..20: mol_type = other RNA
cgccctcttagcggaggtcc

SEQ ID NO: 4291 - RNA, 20 nt, synthetic construct
  misc_feature 1..20: note = source = /note="Description of Artificial Sequence: Synthetic oligonucleotide"
  source 1..20: mol_type = other RNA
ctccgccctcttagcggagg

SEQ ID NO: 4292 - RNA, 20 nt, synthetic construct
  misc_feature 1..20: note = source = /note="Description of Artificial Sequence: Synthetic oligonucleotide"
  source 1..20: mol_type = other RNA
cgatgacccctccgactccg

SEQ ID NO: 4293 - RNA, 20 nt, synthetic construct
  misc_feature 1..20: note = source = /note="Description of Artificial Sequence: Synthetic oligonucleotide"
  source 1..20: mol_type = other RNA
tcgatgacccctccgactcc

SEQ ID NO: 4294 - RNA, 20 nt, synthetic construct
  misc_feature 1..20: note = source = /note="Description of Artificial Sequence: Synthetic oligonucleotide"
  source 1..20: mol_type = other RNA
gggtcgatgacccctccgac

SEQ ID NO: 4295 - RNA, 20 nt, synthetic construct
  misc_feature 1..20: note = source = /note="Description of Artificial Sequence: Synthetic oligonucleotide"
  source 1..20: mol_type = other RNA
acatcagggtcgatgacccc

SEQ ID NO: 4296 - RNA, 20 nt, synthetic construct
  misc_feature 1..20: note = source = /note="Description of Artificial Sequence: Synthetic oligonucleotide"
  source 1..20: mol_type = other RNA
cggacatcagggtcgatgac

SEQ ID NO: 4297 - RNA, 20 nt, synthetic construct
  misc_feature 1..20: note = source = /note="Description of Artificial Sequence: Synthetic oligonucleotide"
  source 1..20: mol_type = other RNA
tcggacatcagggtcgatga

SEQ ID NO: 4298 - RNA, 20 nt, synthetic construct
  misc_feature 1..20: note = source = /note="Description of Artificial Sequence: Synthetic oligonucleotide"
  source 1..20: mol_type = other RNA
ttcggacatcagggtcgatg

SEQ ID NO: 4299 - RNA, 20 nt, synthetic construct
  misc_feature 1..20: note = source = /note="Description of Artificial Sequence: Synthetic oligonucleotide"
  source 1..20: mol_type = other RNA
atttttaataggtccgtacc

SEQ ID NO: 4300 - RNA, 20 nt, synthetic construct
  misc_feature 1..20: note = source = /note="Description of Artificial Sequence: Synthetic oligonucleotide"
  source 1..20: mol_type = other RNA
tatatttttaataggtccgt

SEQ ID NO: 4301 - RNA, 20 nt, synthetic construct
  misc_feature 1..20: note = source = /note="Description of Artificial Sequence: Synthetic oligonucleotide"
  source 1..20: mol_type = other RNA
atttttatatttttaatagg

SEQ ID NO: 4302 - RNA, 20 nt, synthetic construct
  misc_feature 1..20: note = source = /note="Description of Artificial Sequence: Synthetic oligonucleotide"
  source 1..20: mol_type = other RNA
acccacctagtgaactccag

SEQ ID NO: 4303 - RNA, 20 nt, synthetic construct
  misc_feature 1..20: note = source = /note="Description of Artificial Sequence: Synthetic oligonucleotide"
  source 1..20: mol_type = other RNA
gttccacccacctagtgaac

SEQ ID NO: 4304 - RNA, 20 nt, synthetic construct
  misc_feature 1..20: note = source = /note="Description of Artificial Sequence: Synthetic oligonucleotide"
  source 1..20: mol_type = other RNA
gaaaccctccggttccaccc

SEQ ID NO: 4305 - RNA, 20 nt, synthetic construct
  misc_feature 1..20: note = source = /note="Description of Artificial Sequence: Synthetic oligonucleotide"
  source 1..20: mol_type = other RNA
cgtgaaaccctccggttcca

SEQ ID NO: 4306 - RNA, 20 nt, synthetic construct
  misc_feature 1..20: note = source = /note="Description of Artificial Sequence: Synthetic oligonucleotide"
  source 1..20: mol_type = other RNA
tcgtgaaaccctccggttcc

SEQ ID NO: 4307 - RNA, 20 nt, synthetic construct
  misc_feature 1..20: note = source = /note="Description of Artificial Sequence: Synthetic oligonucleotide"
  source 1..20: mol_type = other RNA
gggtcgtgaaaccctccggt

SEQ ID NO: 4308 - RNA, 20 nt, synthetic construct
  misc_feature 1..20: note = source = /note="Description of Artificial Sequence: Synthetic oligonucleotide"
  source 1..20: mol_type = other RNA
acgttagggtcgtgaaaccc

SEQ ID NO: 4309 - RNA, 20 nt, synthetic construct
  misc_feature 1..20: note = source = /note="Description of Artificial Sequence: Synthetic oligonucleotide"
  source 1..20: mol_type = other RNA
cggacgttagggtcgtgaaa

SEQ ID NO: 4310 - RNA, 20 nt, synthetic construct
  misc_feature 1..20: note = source = /note="Description of Artificial Sequence: Synthetic oligonucleotide"
  source 1..20: mol_type = other RNA
acggacgttagggtcgtgaa

SEQ ID NO: 4311 - RNA, 20 nt, synthetic construct
  misc_feature 1..20: note = source = /note="Description of Artificial Sequence: Synthetic oligonucleotide"
  source 1..20: mol_type = other RNA
atcatgaacggtccggcgcc

SEQ ID NO: 4312 - RNA, 20 nt, synthetic construct
  misc_feature 1..20: note = source = /note="Description of Artificial Sequence: Synthetic oligonucleotide"
  source 1..20: mol_type = other RNA
tggatcatgaacggtccggc

SEQ ID NO: 4313 - RNA, 20 nt, synthetic construct
  misc_feature 1..20: note = source = /note="Description of Artificial Sequence: Synthetic oligonucleotide"
  source 1..20: mol_type = other RNA
ctattttggatcatgaacgg

SEQ ID NO: 4314 - RNA, 20 nt, synthetic construct
  misc_feature 1..20: note = source = /note="Description of Artificial Sequence: Synthetic oligonucleotide"
  source 1..20: mol_type = other RNA
gaagcttaatgatgctattt

SEQ ID NO: 4315 - RNA, 20 nt, synthetic construct
  misc_feature 1..20: note = source = /note="Description of Artificial Sequence: Synthetic oligonucleotide"
  source 1..20: mol_type = other RNA
taaatacagtgatgactcac

SEQ ID NO: 4316 - RNA, 20 nt, synthetic construct
  misc_feature 1..20: note = source = /note="Description of Artificial Sequence: Synthetic oligonucleotide"
  source 1..20: mol_type = other RNA
tcctcagtagccaataattc

SEQ ID NO: 4317 - RNA, 20 nt, synthetic construct
  misc_feature 1..20: note = source = /note="Description of Artificial Sequence: Synthetic oligonucleotide"
  source 1..20: mol_type = other RNA
cagtcccctttagtaaaaag

SEQ ID NO: 4318 - RNA, 20 nt, synthetic construct
  misc_feature 1..20: note = source = /note="Description of Artificial Sequence: Synthetic oligonucleotide"
  source 1..20: mol_type = other RNA
atcaagctggcaaactatca

SEQ ID NO: 4319 - RNA, 20 nt, synthetic construct
  misc_feature 1..20: note = source = /note="Description of Artificial Sequence: Synthetic oligonucleotide"
  source 1..20: mol_type = other RNA
tggttgactgggaatcaagc

SEQ ID NO: 4320 - RNA, 20 nt, synthetic construct
  misc_feature 1..20: note = source = /note="Description of Artificial Sequence: Synthetic oligonucleotide"
  source 1..20: mol_type = other RNA
cagcagttatctggttgact

SEQ ID NO: 4321 - RNA, 20 nt, synthetic construct
  misc_feature 1..20: note = source = /note="Description of Artificial Sequence: Synthetic oligonucleotide"
  source 1..20: mol_type = other RNA
ccagcagttatctggttgac

SEQ ID NO: 4322 - RNA, 20 nt, synthetic construct
  misc_feature 1..20: note = source = /note="Description of Artificial Sequence: Synthetic oligonucleotide"
  source 1..20: mol_type = other RNA
tgtcactaccagcagttatc

SEQ ID NO: 4323 - RNA, 20 nt, synthetic construct
  misc_feature 1..20: note = source = /note="Description of Artificial Sequence: Synthetic oligonucleotide"
  source 1..20: mol_type = other RNA
cacaagattgggagtcctgg

SEQ ID NO: 4324 - RNA, 20 nt, synthetic construct
  misc_feature 1..20: note = source = /note="Description of Artificial Sequence: Synthetic oligonucleotide"
  source 1..20: mol_type = other RNA
tggcacaagattgggagtcc

SEQ ID NO: 4325 - RNA, 20 nt, synthetic construct
  misc_feature 1..20: note = source = /note="Description of Artificial Sequence: Synthetic oligonucleotide"
  source 1..20: mol_type = other RNA
ctctgagctggcacaagatt

SEQ ID NO: 4326 - RNA, 20 nt, synthetic construct
  misc_feature 1..20: note = source = /note="Description of Artificial Sequence: Synthetic oligonucleotide"
  source 1..20: mol_type = other RNA
tctctgagctggcacaagat

SEQ ID NO: 4327 - RNA, 20 nt, synthetic construct
  misc_feature 1..20: note = source = /note="Description of Artificial Sequence: Synthetic oligonucleotide"
  source 1..20: mol_type = other RNA
ggggatttccctctctgagc

SEQ ID NO: 4328 - RNA, 20 nt, synthetic construct
  misc_feature 1..20: note = source = /note="Description of Artificial Sequence: Synthetic oligonucleotide"
  source 1..20: mol_type = other RNA
atggtgtgagcagttctagg

SEQ ID NO: 4329 - RNA, 20 nt, synthetic construct
  misc_feature 1..20: note = source = /note="Description of Artificial Sequence: Synthetic oligonucleotide"
  source 1..20: mol_type = other RNA
aatggtgtgagcagttctag

SEQ ID NO: 4330 - RNA, 20 nt, synthetic construct
  misc_feature 1..20: note = source = /note="Description of Artificial Sequence: Synthetic oligonucleotide"
  source 1..20: mol_type = other RNA
gaatggtgtgagcagttcta

SEQ ID NO: 4331 - RNA, 20 nt, synthetic construct
  misc_feature 1..20: note = source = /note="Description of Artificial Sequence: Synthetic oligonucleotide"
  source 1..20: mol_type = other RNA
ggaatggtgtgagcagttct

SEQ ID NO: 4332 - RNA, 20 nt, synthetic construct
  misc_feature 1..20: note = source = /note="Description of Artificial Sequence: Synthetic oligonucleotide"
  source 1..20: mol_type = other RNA
ggtgcttgtggttcttggaa

SEQ ID NO: 4333 - RNA, 20 nt, synthetic construct
  misc_feature 1..20: note = source = /note="Description of Artificial Sequence: Synthetic oligonucleotide"
  source 1..20: mol_type = other RNA
aaggtggtgcttgtggttct

SEQ ID NO: 4334 - RNA, 20 nt, synthetic construct
  misc_feature 1..20: note = source = /note="Description of Artificial Sequence: Synthetic oligonucleotide"
  source 1..20: mol_type = other RNA
ctataccaaggtggtgcttg

SEQ ID NO: 4335 - RNA, 20 nt, synthetic construct
  misc_feature 1..20: note = source = /note="Description of Artificial Sequence: Synthetic oligonucleotide"
  source 1..20: mol_type = other RNA
catttttaactataccaagg

SEQ ID NO: 4336 - RNA, 20 nt, synthetic construct
  misc_feature 1..20: note = source = /note="Description of Artificial Sequence: Synthetic oligonucleotide"
  source 1..20: mol_type = other RNA
tcacatttttaactatacca

SEQ ID NO: 4337 - RNA, 20 nt, synthetic construct
  misc_feature 1..20: note = source = /note="Description of Artificial Sequence: Synthetic oligonucleotide"
  source 1..20: mol_type = other RNA
gtttttatcagaatttgagt

SEQ ID NO: 4338 - RNA, 20 nt, synthetic construct
  misc_feature 1..20: note = source = /note="Description of Artificial Sequence: Synthetic oligonucleotide"
  source 1..20: mol_type = other RNA
ccaaatactgaggaaggcag

SEQ ID NO: 4339 - RNA, 20 nt, synthetic construct
  misc_feature 1..20: note = source = /note="Description of Artificial Sequence: Synthetic oligonucleotide"
  source 1..20: mol_type = other RNA
gacaaaccaaatactgagga

SEQ ID NO: 4340 - RNA, 20 nt, synthetic construct
  misc_feature 1..20: note = source = /note="Description of Artificial Sequence: Synthetic oligonucleotide"
  source 1..20: mol_type = other RNA
aactgacaaaccaaatactg

SEQ ID NO: 4341 - RNA, 20 nt, synthetic construct
  misc_feature 1..20: note = source = /note="Description of Artificial Sequence: Synthetic oligonucleotide"
  source 1..20: mol_type = other RNA
acattattaagattagaaga

SEQ ID NO: 4342 - RNA, 20 nt, synthetic construct
  misc_feature 1..20: note = source = /note="Description of Artificial Sequence: Synthetic oligonucleotide"
  source 1..20: mol_type = other RNA
aacattattaagattagaag

SEQ ID NO: 4343 - RNA, 20 nt, synthetic construct
  misc_feature 1..20: note = source = /note="Description of Artificial Sequence: Synthetic oligonucleotide"
  source 1..20: mol_type = other RNA
aggtcagggttggagtcaat

SEQ ID NO: 4344 - RNA, 20 nt, synthetic construct
  misc_feature 1..20: note = source = /note="Description of Artificial Sequence: Synthetic oligonucleotide"
  source 1..20: mol_type = other RNA
gaagtacaggaggtcagggt

SEQ ID NO: 4345 - RNA, 20 nt, synthetic construct
  misc_feature 1..20: note = source = /note="Description of Artificial Sequence: Synthetic oligonucleotide"
  source 1..20: mol_type = other RNA
aggtgaagtacaggaggtca

SEQ ID NO: 4346 - RNA, 20 nt, synthetic construct
  misc_feature 1..20: note = source = /note="Description of Artificial Sequence: Synthetic oligonucleotide"
  source 1..20: mol_type = other RNA
caggtgaagtacaggaggtc

SEQ ID NO: 4347 - RNA, 20 nt, synthetic construct
  misc_feature 1..20: note = source = /note="Description of Artificial Sequence: Synthetic oligonucleotide"
  source 1..20: mol_type = other RNA
tcaggcaggtgaagtacagg

SEQ ID NO: 4348 - RNA, 20 nt, synthetic construct
  misc_feature 1..20: note = source = /note="Description of Artificial Sequence: Synthetic oligonucleotide"
  source 1..20: mol_type = other RNA
tcatcaggcaggtgaagtac

SEQ ID NO: 4349 - RNA, 20 nt, synthetic construct
  misc_feature 1..20: note = source = /note="Description of Artificial Sequence: Synthetic oligonucleotide"
  source 1..20: mol_type = other RNA
caaataaatattcatcaggc

SEQ ID NO: 4350 - RNA, 20 nt, synthetic construct
  misc_feature 1..20: note = source = /note="Description of Artificial Sequence: Synthetic oligonucleotide"
  source 1..20: mol_type = other RNA
attccaaataaatattcatc

SEQ ID NO: 4351 - RNA, 20 nt, synthetic construct
  misc_feature 1..20: note = source = /note="Description of Artificial Sequence: Synthetic oligonucleotide"
  source 1..20: mol_type = other RNA
ataaatagataattctagaa

SEQ ID NO: 4352 - RNA, 20 nt, synthetic construct
  misc_feature 1..20: note = source = /note="Description of Artificial Sequence: Synthetic oligonucleotide"
  source 1..20: mol_type = other RNA
agtgataaagcttttgagtt

SEQ ID NO: 4353 - RNA, 20 nt, synthetic construct
  misc_feature 1..20: note = source = /note="Description of Artificial Sequence: Synthetic oligonucleotide"
  source 1..20: mol_type = other RNA
attactgataaagaaatgaa

SEQ ID NO: 4354 - RNA, 20 nt, synthetic construct
  misc_feature 1..20: note = source = /note="Description of Artificial Sequence: Synthetic oligonucleotide"
  source 1..20: mol_type = other RNA
caatagttggaatgagaggg

SEQ ID NO: 4355 - RNA, 20 nt, synthetic construct
  misc_feature 1..20: note = source = /note="Description of Artificial Sequence: Synthetic oligonucleotide"
  source 1..20: mol_type = other RNA
aagcaatagttggaatgaga

SEQ ID NO: 4356 - RNA, 20 nt, synthetic construct
  misc_feature 1..20: note = source = /note="Description of Artificial Sequence: Synthetic oligonucleotide"
  source 1..20: mol_type = other RNA
taagcaatagttggaatgag

SEQ ID NO: 4357 - RNA, 20 nt, synthetic construct
  misc_feature 1..20: note = source = /note="Description of Artificial Sequence: Synthetic oligonucleotide"
  source 1..20: mol_type = other RNA
actcaagtataagcaatagt

SEQ ID NO: 4358 - RNA, 20 nt, synthetic construct
  misc_feature 1..20: note = source = /note="Description of Artificial Sequence: Synthetic oligonucleotide"
  source 1..20: mol_type = other RNA
aataatcatatgcaagatat

SEQ ID NO: 4359 - RNA, 20 nt, synthetic construct
  misc_feature 1..20: note = source = /note="Description of Artificial Sequence: Synthetic oligonucleotide"
  source 1..20: mol_type = other RNA
acacttcaccatgaagattt

SEQ ID NO: 4360 - RNA, 20 nt, synthetic construct
  misc_feature 1..20: note = source = /note="Description of Artificial Sequence: Synthetic oligonucleotide"
  source 1..20: mol_type = other RNA
ggtagggtcactcacacttc

SEQ ID NO: 4361 - RNA, 20 nt, synthetic construct
  misc_feature 1..20: note = source = /note="Description of Artificial Sequence: Synthetic oligonucleotide"
  source 1..20: mol_type = other RNA
taaggtgatcgttacacagt

SEQ ID NO: 4362 - RNA, 20 nt, synthetic construct
  misc_feature 1..20: note = source = /note="Description of Artificial Sequence: Synthetic oligonucleotide"
  source 1..20: mol_type = other RNA
gtaaggtgatcgttacacag

SEQ ID NO: 4363 - RNA, 20 nt, synthetic construct
  misc_feature 1..20: note = source = /note="Description of Artificial Sequence: Synthetic oligonucleotide"
  source 1..20: mol_type = other RNA
acggtttgacaaaacgtttc

SEQ ID NO: 4364 - RNA, 20 nt, synthetic construct
  misc_feature 1..20: note = source = /note="Description of Artificial Sequence: Synthetic oligonucleotide"
  source 1..20: mol_type = other RNA
tcgctttgatgacccagaat

SEQ ID NO: 4365 - RNA, 20 nt, synthetic construct
  misc_feature 1..20: note = source = /note="Description of Artificial Sequence: Synthetic oligonucleotide"
  source 1..20: mol_type = other RNA
agggattctcgctttgatga

SEQ ID NO: 4366 - RNA, 20 nt, synthetic construct
  misc_feature 1..20: note = source = /note="Description of Artificial Sequence: Synthetic oligonucleotide"
  source 1..20: mol_type = other RNA
tagggattctcgctttgatg

SEQ ID NO: 4367 - RNA, 20 nt, synthetic construct
  misc_feature 1..20: note = source = /note="Description of Artificial Sequence: Synthetic oligonucleotide"
  source 1..20: mol_type = other RNA
caaaagttaagagaactctc

SEQ ID NO: 4368 - RNA, 20 nt, synthetic construct
  misc_feature 1..20: note = source = /note="Description of Artificial Sequence: Synthetic oligonucleotide"
  source 1..20: mol_type = other RNA
tacaaatattcaaaaacata

SEQ ID NO: 4369 - RNA, 20 nt, synthetic construct
  misc_feature 1..20: note = source = /note="Description of Artificial Sequence: Synthetic oligonucleotide"
  source 1..20: mol_type = other RNA
ttacaaatattcaaaaacat

SEQ ID NO: 4370 - RNA, 20 nt, synthetic construct
  misc_feature 1..20: note = source = /note="Description of Artificial Sequence: Synthetic oligonucleotide"
  source 1..20: mol_type = other RNA
cttattacgacgttgtttgt

SEQ ID NO: 4371 - RNA, 20 nt, synthetic construct
  misc_feature 1..20: note = source = /note="Description of Artificial Sequence: Synthetic oligonucleotide"
  source 1..20: mol_type = other RNA
aaacccaacgaagatggaaa

SEQ ID NO: 4372 - RNA, 20 nt, synthetic construct
  misc_feature 1..20: note = source = /note="Description of Artificial Sequence: Synthetic oligonucleotide"
  source 1..20: mol_type = other RNA
agtaggtagacatccgtaaa

SEQ ID NO: 4373 - RNA, 20 nt, synthetic construct
  misc_feature 1..20: note = source = /note="Description of Artificial Sequence: Synthetic oligonucleotide"
  source 1..20: mol_type = other RNA
aagtaggtagacatccgtaa

SEQ ID NO: 4374 - RNA, 20 nt, synthetic construct
  misc_feature 1..20: note = source = /note="Description of Artificial Sequence: Synthetic oligonucleotide"
  source 1..20: mol_type = other RNA
aataggtaagtaggtagaca

SEQ ID NO: 4375 - RNA, 20 nt, synthetic construct
  misc_feature 1..20: note = source = /note="Description of Artificial Sequence: Synthetic oligonucleotide"
  source 1..20: mol_type = other RNA
gtcttaaaagaaggagaaat

SEQ ID NO: 4376 - RNA, 20 nt, synthetic construct
  misc_feature 1..20: note = source = /note="Description of Artificial Sequence: Synthetic oligonucleotide"
  source 1..20: mol_type = other RNA
ttataaaaagaaacacacta

SEQ ID NO: 4377 - RNA, 20 nt, synthetic construct
  misc_feature 1..20: note = source = /note="Description of Artificial Sequence: Synthetic oligonucleotide"
  source 1..20: mol_type = other RNA
aagattcatggagtacattc

SEQ ID NO: 4378 - RNA, 20 nt, synthetic construct
  misc_feature 1..20: note = source = /note="Description of Artificial Sequence: Synthetic oligonucleotide"
  source 1..20: mol_type = other RNA
aacgaggaggagggtcgggg

SEQ ID NO: 4379 - RNA, 20 nt, synthetic construct
  misc_feature 1..20: note = source = /note="Description of Artificial Sequence: Synthetic oligonucleotide"
  source 1..20: mol_type = other RNA
ataaattcatatgataagac

SEQ ID NO: 4380 - RNA, 20 nt, synthetic construct
  misc_feature 1..20: note = source = /note="Description of Artificial Sequence: Synthetic oligonucleotide"
  source 1..20: mol_type = other RNA
ggagtatttattacgaagaa

SEQ ID NO: 4381 - RNA, 20 nt, synthetic construct
  misc_feature 1..20: note = source = /note="Description of Artificial Sequence: Synthetic oligonucleotide"
  source 1..20: mol_type = other RNA
cgatagttactacttgaaaa

SEQ ID NO: 4382 - RNA, 20 nt, synthetic construct
  misc_feature 1..20: note = source = /note="Description of Artificial Sequence: Synthetic oligonucleotide"
  source 1..20: mol_type = other RNA
tcgatagttactacttgaaa

SEQ ID NO: 4383 - RNA, 20 nt, synthetic construct
  misc_feature 1..20: note = source = /note="Description of Artificial Sequence: Synthetic oligonucleotide"
  source 1..20: mol_type = other RNA
gtgaatcacattacaaaaat

SEQ ID NO: 4384 - RNA, 20 nt, synthetic construct
  misc_feature 1..20: note = source = /note="Description of Artificial Sequence: Synthetic oligonucleotide"
  source 1..20: mol_type = other RNA
ttttaaaccggaaaatgcag

SEQ ID NO: 4385 - RNA, 20 nt, synthetic construct
  misc_feature 1..20: note = source = /note="Description of Artificial Sequence: Synthetic oligonucleotide"
  source 1..20: mol_type = other RNA
tatattttggtatgttttaa

SEQ ID NO: 4386 - RNA, 20 nt, synthetic construct
  misc_feature 1..20: note = source = /note="Description of Artificial Sequence: Synthetic oligonucleotide"
  source 1..20: mol_type = other RNA
ttagttgaaagtcagaaata

SEQ ID NO: 4387 - RNA, 20 nt, synthetic construct
  misc_feature 1..20: note = source = /note="Description of Artificial Sequence: Synthetic oligonucleotide"
  source 1..20: mol_type = other RNA
attagttgaaagtcagaaat

SEQ ID NO: 4388 - RNA, 20 nt, synthetic construct
  misc_feature 1..20: note = source = /note="Description of Artificial Sequence: Synthetic oligonucleotide"
  source 1..20: mol_type = other RNA
aagtaaggagggggcccgga

SEQ ID NO: 4389 - RNA, 20 nt, synthetic construct
  misc_feature 1..20: note = source = /note="Description of Artificial Sequence: Synthetic oligonucleotide"
  source 1..20: mol_type = other RNA
aaaagtaagtaaggaggggg

SEQ ID NO: 4390 - RNA, 20 nt, synthetic construct
  misc_feature 1..20: note = source = /note="Description of Artificial Sequence: Synthetic oligonucleotide"
  source 1..20: mol_type = other RNA
caaaagtaagtaaggagggg

SEQ ID NO: 4391 - RNA, 20 nt, synthetic construct
  misc_feature 1..20: note = source = /note="Description of Artificial Sequence: Synthetic oligonucleotide"
  source 1..20: mol_type = other RNA
gttttttgggtcatgggtaa

SEQ ID NO: 4392 - RNA, 20 nt, synthetic construct
  misc_feature 1..20: note = source = /note="Description of Artificial Sequence: Synthetic oligonucleotide"
  source 1..20: mol_type = other RNA
acatttcatatactcagtca

SEQ ID NO: 4393 - RNA, 20 nt, synthetic construct
  misc_feature 1..20: note = source = /note="Description of Artificial Sequence: Synthetic oligonucleotide"
  source 1..20: mol_type = other RNA
aacatttcatatactcagtc

SEQ ID NO: 4394 - RNA, 20 nt, synthetic construct
  misc_feature 1..20: note = source = /note="Description of Artificial Sequence: Synthetic oligonucleotide"
  source 1..20: mol_type = other RNA
gccatacgttaaaatttaag

SEQ ID NO: 4395 - RNA, 20 nt, synthetic construct
  misc_feature 1..20: note = source = /note="Description of Artificial Sequence: Synthetic oligonucleotide"
  source 1..20: mol_type = other RNA
agccatacgttaaaatttaa

SEQ ID NO: 4396 - RNA, 20 nt, synthetic construct
  misc_feature 1..20: note = source = /note="Description of Artificial Sequence: Synthetic oligonucleotide"
  source 1..20: mol_type = other RNA
aagccatacgttaaaattta

SEQ ID NO: 4397 - RNA, 20 nt, synthetic construct
  misc_feature 1..20: note = source = /note="Description of Artificial Sequence: Synthetic oligonucleotide"
  source 1..20: mol_type = other RNA
acgttgcttctttagaaaca

SEQ ID NO: 4398 - RNA, 20 nt, synthetic construct
  misc_feature 1..20: note = source = /note="Description of Artificial Sequence: Synthetic oligonucleotide"
  source 1..20: mol_type = other RNA
tctttatcattcgactctga

SEQ ID NO: 4399 - RNA, 20 nt, synthetic construct
  misc_feature 1..20: note = source = /note="Description of Artificial Sequence: Synthetic oligonucleotide"
  source 1..20: mol_type = other RNA
atctttatcattcgactctg

SEQ ID NO: 4400 - RNA, 20 nt, synthetic construct
  misc_feature 1..20: note = source = /note="Description of Artificial Sequence: Synthetic oligonucleotide"
  source 1..20: mol_type = other RNA
taaaatgtctcattcttccc

SEQ ID NO: 4401 - RNA, 20 nt, synthetic construct
  misc_feature 1..20: note = source = /note="Description of Artificial Sequence: Synthetic oligonucleotide"
  source 1..20: mol_type = other RNA
gggtaaaatgtctcattctt

SEQ ID NO: 4402 - RNA, 20 nt, synthetic construct
  misc_feature 1..20: note = source = /note="Description of Artificial Sequence: Synthetic oligonucleotide"
  source 1..20: mol_type = other RNA
agggtaaaatgtctcattct

SEQ ID NO: 4403 - RNA, 20 nt, synthetic construct
  misc_feature 1..20: note = source = /note="Description of Artificial Sequence: Synthetic oligonucleotide"
  source 1..20: mol_type = other RNA
taaattgtgagtttttttag

SEQ ID NO: 4404 - RNA, 20 nt, synthetic construct
  misc_feature 1..20: note = source = /note="Description of Artificial Sequence: Synthetic oligonucleotide"
  source 1..20: mol_type = other RNA
gctcaggttcccggggttga

SEQ ID NO: 4405 - RNA, 20 nt, synthetic construct
  misc_feature 1..20: note = source = /note="Description of Artificial Sequence: Synthetic oligonucleotide"
  source 1..20: mol_type = other RNA
agttgaagctcaggttcccg

SEQ ID NO: 4406 - RNA, 20 nt, synthetic construct
  misc_feature 1..20: note = source = /note="Description of Artificial Sequence: Synthetic oligonucleotide"
  source 1..20: mol_type = other RNA
cagttgaagctcaggttccc

SEQ ID NO: 4407 - RNA, 20 nt, synthetic construct
  misc_feature 1..20: note = source = /note="Description of Artificial Sequence: Synthetic oligonucleotide"
  source 1..20: mol_type = other RNA
gcagttgaagctcaggttcc

SEQ ID NO: 4408 - RNA, 20 nt, synthetic construct
  misc_feature 1..20: note = source = /note="Description of Artificial Sequence: Synthetic oligonucleotide"
  source 1..20: mol_type = other RNA
atcagaagcagttgaagctc

SEQ ID NO: 4409 - RNA, 20 nt, synthetic construct
  misc_feature 1..20: note = source = /note="Description of Artificial Sequence: Synthetic oligonucleotide"
  source 1..20: mol_type = other RNA
gaatatcctgaaatagtatc

SEQ ID NO: 4410 - RNA, 20 nt, synthetic construct
  misc_feature 1..20: note = source = /note="Description of Artificial Sequence: Synthetic oligonucleotide"
  source 1..20: mol_type = other RNA
tgaatatatggaaacagtat

SEQ ID NO: 4411 - RNA, 20 nt, synthetic construct
  misc_feature 1..20: note = source = /note="Description of Artificial Sequence: Synthetic oligonucleotide"
  source 1..20: mol_type = other RNA
ggtccattgtcctgaatata

SEQ ID NO: 4412 - RNA, 20 nt, synthetic construct
  misc_feature 1..20: note = source = /note="Description of Artificial Sequence: Synthetic oligonucleotide"
  source 1..20: mol_type = other RNA
gataaaatggctaaaggagt

SEQ ID NO: 4413 - RNA, 20 nt, synthetic construct
  misc_feature 1..20: note = source = /note="Description of Artificial Sequence: Synthetic oligonucleotide"
  source 1..20: mol_type = other RNA
agttttgataaaatggctaa

SEQ ID NO: 4414 - RNA, 20 nt, synthetic construct
  misc_feature 1..20: note = source = /note="Description of Artificial Sequence: Synthetic oligonucleotide"
  source 1..20: mol_type = other RNA
tctaaagagttttgataaaa

SEQ ID NO: 4415 - RNA, 20 nt, synthetic construct
  misc_feature 1..20: note = source = /note="Description of Artificial Sequence: Synthetic oligonucleotide"
  source 1..20: mol_type = other RNA
aaaggagcacaagaagactt

SEQ ID NO: 4416 - RNA, 20 nt, synthetic construct
  misc_feature 1..20: note = source = /note="Description of Artificial Sequence: Synthetic oligonucleotide"
  source 1..20: mol_type = other RNA
tgactgaagagtgtctacaa

SEQ ID NO: 4417 - RNA, 20 nt, synthetic construct
  misc_feature 1..20: note = source = /note="Description of Artificial Sequence: Synthetic oligonucleotide"
  source 1..20: mol_type = other RNA
atacagctgcagcaaattgg

SEQ ID NO: 4418 - RNA, 20 nt, synthetic construct
  misc_feature 1..20: note = source = /note="Description of Artificial Sequence: Synthetic oligonucleotide"
  source 1..20: mol_type = other RNA
cagatacagctgcagcaaat

SEQ ID NO: 4419 - RNA, 20 nt, synthetic construct
  misc_feature 1..20: note = source = /note="Description of Artificial Sequence: Synthetic oligonucleotide"
  source 1..20: mol_type = other RNA
ggggagaaagcgttgttttg

SEQ ID NO: 4420 - RNA, 20 nt, synthetic construct
  misc_feature 1..20: note = source = /note="Description of Artificial Sequence: Synthetic oligonucleotide"
  source 1..20: mol_type = other RNA
gcagagagaaaagaggaatg

SEQ ID NO: 4421 - RNA, 20 nt, synthetic construct
  misc_feature 1..20: note = source = /note="Description of Artificial Sequence: Synthetic oligonucleotide"
  source 1..20: mol_type = other RNA
ggcagagagaaaagaggaat

SEQ ID NO: 4422 - RNA, 20 nt, synthetic construct
  misc_feature 1..20: note = source = /note="Description of Artificial Sequence: Synthetic oligonucleotide"
  source 1..20: mol_type = other RNA
gggcagagagaaaagaggaa

SEQ ID NO: 4423 - RNA, 20 nt, synthetic construct
  misc_feature 1..20: note = source = /note="Description of Artificial Sequence: Synthetic oligonucleotide"
  source 1..20: mol_type = other RNA
tccaagggcagagagaaaag

SEQ ID NO: 4424 - RNA, 20 nt, synthetic construct
  misc_feature 1..20: note = source = /note="Description of Artificial Sequence: Synthetic oligonucleotide"
  source 1..20: mol_type = other RNA
agaagtccacagagttccaa

SEQ ID NO: 4425 - RNA, 20 nt, synthetic construct
  misc_feature 1..20: note = source = /note="Description of Artificial Sequence: Synthetic oligonucleotide"
  source 1..20: mol_type = other RNA
gagaagtccacagagttcca

SEQ ID NO: 4426 - RNA, 20 nt, synthetic construct
  misc_feature 1..20: note = source = /note="Description of Artificial Sequence: Synthetic oligonucleotide"
  source 1..20: mol_type = other RNA
atgcactgataaaagggagt

SEQ ID NO: 4427 - RNA, 20 nt, synthetic construct
  misc_feature 1..20: note = source = /note="Description of Artificial Sequence: Synthetic oligonucleotide"
  source 1..20: mol_type = other RNA
gatgacatgcactgataaaa

SEQ ID NO: 4428 - RNA, 20 nt, synthetic construct
  misc_feature 1..20: note = source = /note="Description of Artificial Sequence: Synthetic oligonucleotide"
  source 1..20: mol_type = other RNA
agatgacatgcactgataaa

SEQ ID NO: 4429 - RNA, 20 nt, synthetic construct
  misc_feature 1..20: note = source = /note="Description of Artificial Sequence: Synthetic oligonucleotide"
  source 1..20: mol_type = other RNA
tattgggtgctacaaataag

SEQ ID NO: 4430 - RNA, 20 nt, synthetic construct
  misc_feature 1..20: note = source = /note="Description of Artificial Sequence: Synthetic oligonucleotide"
  source 1..20: mol_type = other RNA
aaagatgtagtaaaaatatt

SEQ ID NO: 4431 - RNA, 20 nt, synthetic construct
  misc_feature 1..20: note = source = /note="Description of Artificial Sequence: Synthetic oligonucleotide"
  source 1..20: mol_type = other RNA
caaagatgtagtaaaaatat

SEQ ID NO: 4432 - RNA, 20 nt, synthetic construct
  misc_feature 1..20: note = source = /note="Description of Artificial Sequence: Synthetic oligonucleotide"
  source 1..20: mol_type = other RNA
taacccaagtaagacttaat

SEQ ID NO: 4433 - RNA, 20 nt, synthetic construct
  misc_feature 1..20: note = source = /note="Description of Artificial Sequence: Synthetic oligonucleotide"
  source 1..20: mol_type = other RNA
ctgacctgtatatctttaaa

SEQ ID NO: 4434 - RNA, 20 nt, synthetic construct
  misc_feature 1..20: note = source = /note="Description of Artificial Sequence: Synthetic oligonucleotide"
  source 1..20: mol_type = other RNA
aaattaaatcgacctctctg

SEQ ID NO: 4435 - RNA, 20 nt, synthetic construct
  misc_feature 1..20: note = source = /note="Description of Artificial Sequence: Synthetic oligonucleotide"
  source 1..20: mol_type = other RNA
gagttcccaaaattaaatcg

SEQ ID NO: 4436 - RNA, 20 nt, synthetic construct
  misc_feature 1..20: note = source = /note="Description of Artificial Sequence: Synthetic oligonucleotide"
  source 1..20: mol_type = other RNA
gtacaccagagacacgagtt

SEQ ID NO: 4437 - RNA, 20 nt, synthetic construct
  misc_feature 1..20: note = source = /note="Description of Artificial Sequence: Synthetic oligonucleotide"
  source 1..20: mol_type = other RNA
tgtacaccagagacacgagt

SEQ ID NO: 4438 - RNA, 20 nt, synthetic construct
  misc_feature 1..20: note = source = /note="Description of Artificial Sequence: Synthetic oligonucleotide"
  source 1..20: mol_type = other RNA
tccattttgtaatattgtac

SEQ ID NO: 4439 - RNA, 20 nt, synthetic construct
  misc_feature 1..20: note = source = /note="Description of Artificial Sequence: Synthetic oligonucleotide"
  source 1..20: mol_type = other RNA
gtacgattcacgataccttt

SEQ ID NO: 4440 - RNA, 20 nt, synthetic construct
  misc_feature 1..20: note = source = /note="Description of Artificial Sequence: Synthetic oligonucleotide"
  source 1..20: mol_type = other RNA
tccattgtacgattcacgat

SEQ ID NO: 4441 - RNA, 20 nt, synthetic construct
  misc_feature 1..20: note = source = /note="Description of Artificial Sequence: Synthetic oligonucleotide"
  source 1..20: mol_type = other RNA
taagtcatatacggtacagt

SEQ ID NO: 4442 - RNA, 20 nt, synthetic construct
  misc_feature 1..20: note = source = /note="Description of Artificial Sequence: Synthetic oligonucleotide"
  source 1..20: mol_type = other RNA
tccctgtacttcatgagatg

SEQ ID NO: 4443 - RNA, 20 nt, synthetic construct
  misc_feature 1..20: note = source = /note="Description of Artificial Sequence: Synthetic oligonucleotide"
  source 1..20: mol_type = other RNA
ccactgacattctacttcag

SEQ ID NO: 4444 - RNA, 20 nt, synthetic construct
  misc_feature 1..20: note = source = /note="Description of Artificial Sequence: Synthetic oligonucleotide"
  source 1..20: mol_type = other RNA
ttctcctttgaaataagagg

SEQ ID NO: 4445 - RNA, 20 nt, synthetic construct
  misc_feature 1..20: note = source = /note="Description of Artificial Sequence: Synthetic oligonucleotide"
  source 1..20: mol_type = other RNA
aagactgaacaactcgattc

SEQ ID NO: 4446 - RNA, 20 nt, synthetic construct
  misc_feature 1..20: note = source = /note="Description of Artificial Sequence: Synthetic oligonucleotide"
  source 1..20: mol_type = other RNA
tagtggatccattcttcaac

SEQ ID NO: 4447 - RNA, 20 nt, synthetic construct
  misc_feature 1..20: note = source = /note="Description of Artificial Sequence: Synthetic oligonucleotide"
  source 1..20: mol_type = other RNA
ccgaatgttctcatagtgga

SEQ ID NO: 4448 - RNA, 20 nt, synthetic construct
  misc_feature 1..20: note = source = /note="Description of Artificial Sequence: Synthetic oligonucleotide"
  source 1..20: mol_type = other RNA
gaatcgtcaccaagtgtcac

SEQ ID NO: 4449 - RNA, 20 nt, synthetic construct
  misc_feature 1..20: note = source = /note="Description of Artificial Sequence: Synthetic oligonucleotide"
  source 1..20: mol_type = other RNA
acttcatctgttgaatcgtc

SEQ ID NO: 4450 - RNA, 20 nt, synthetic construct
  misc_feature 1..20: note = source = /note="Description of Artificial Sequence: Synthetic oligonucleotide"
  source 1..20: mol_type = other RNA
caatgaggcttaagagccag

SEQ ID NO: 4451 - RNA, 20 nt, synthetic construct
  misc_feature 1..20: note = source = /note="Description of Artificial Sequence: Synthetic oligonucleotide"
  source 1..20: mol_type = other RNA
cttcaccgcaataatcaatg

SEQ ID NO: 4452 - RNA, 20 nt, synthetic construct
  misc_feature 1..20: note = source = /note="Description of Artificial Sequence: Synthetic oligonucleotide"
  source 1..20: mol_type = other RNA
tggatatttccattacagtg

SEQ ID NO: 4453 - RNA, 20 nt, synthetic construct
  misc_feature 1..20: note = source = /note="Description of Artificial Sequence: Synthetic oligonucleotide"
  source 1..20: mol_type = other RNA
aggttttggatacctataat

SEQ ID NO: 4454 - RNA, 20 nt, synthetic construct
  misc_feature 1..20: note = source = /note="Description of Artificial Sequence: Synthetic oligonucleotide"
  source 1..20: mol_type = other RNA
ataaagagtttaaaaggttt

SEQ ID NO: 4455 - RNA, 20 nt, synthetic construct
  misc_feature 1..20: note = source = /note="Description of Artificial Sequence: Synthetic oligonucleotide"
  source 1..20: mol_type = other RNA
cctgatataaagagtttaaa

SEQ ID NO: 4456 - RNA, 20 nt, synthetic construct
  misc_feature 1..20: note = source = /note="Description of Artificial Sequence: Synthetic oligonucleotide"
  source 1..20: mol_type = other RNA
taagttagcaaaaaggaaca

SEQ ID NO: 4457 - RNA, 20 nt, synthetic construct
  misc_feature 1..20: note = source = /note="Description of Artificial Sequence: Synthetic oligonucleotide"
  source 1..20: mol_type = other RNA
ttaagttagcaaaaaggaac

SEQ ID NO: 4458 - RNA, 20 nt, synthetic construct
  misc_feature 1..20: note = source = /note="Description of Artificial Sequence: Synthetic oligonucleotide"
  source 1..20: mol_type = other RNA
acatttttaagttagcaaaa

SEQ ID NO: 4459 - RNA, 20 nt, synthetic construct
  misc_feature 1..20: note = source = /note="Description of Artificial Sequence: Synthetic oligonucleotide"
  source 1..20: mol_type = other RNA
ctgagctgctggtaagacag

SEQ ID NO: 4460 - RNA, 20 nt, synthetic construct
  misc_feature 1..20: note = source = /note="Description of Artificial Sequence: Synthetic oligonucleotide"
  source 1..20: mol_type = other RNA
tgaatttattcctaatgtaa

SEQ ID NO: 4461 - RNA, 20 nt, synthetic construct
  misc_feature 1..20: note = source = /note="Description of Artificial Sequence: Synthetic oligonucleotide"
  source 1..20: mol_type = other RNA
tttctttattgtctatgctt

SEQ ID NO: 4462 - RNA, 20 nt, synthetic construct
  misc_feature 1..20: note = source = /note="Description of Artificial Sequence: Synthetic oligonucleotide"
  source 1..20: mol_type = other RNA
ttgtctatgcttaggacaca

SEQ ID NO: 4463 - RNA, 20 nt, synthetic construct
  misc_feature 1..20: note = source = /note="Description of Artificial Sequence: Synthetic oligonucleotide"
  source 1..20: mol_type = other RNA
tatgtatagctgtatttttc

SEQ ID NO: 4464 - RNA, 20 nt, synthetic construct
  misc_feature 1..20: note = source = /note="Description of Artificial Sequence: Synthetic oligonucleotide"
  source 1..20: mol_type = other RNA
ttatcaattctcaatgtcta

SEQ ID NO: 4465 - RNA, 20 nt, synthetic construct
  misc_feature 1..20: note = source = /note="Description of Artificial Sequence: Synthetic oligonucleotide"
  source 1..20: mol_type = other RNA
tctatggagtttttaaaaag

SEQ ID NO: 4466 - RNA, 20 nt, synthetic construct
  misc_feature 1..20: note = source = /note="Description of Artificial Sequence: Synthetic oligonucleotide"
  source 1..20: mol_type = other RNA
ggagtttttaaaaagaggta

SEQ ID NO: 4467 - RNA, 20 nt, synthetic construct
  misc_feature 1..20: note = source = /note="Description of Artificial Sequence: Synthetic oligonucleotide"
  source 1..20: mol_type = other RNA
acttcgtctcaatcttgtta

SEQ ID NO: 4468 - RNA, 20 nt, synthetic construct
  misc_feature 1..20: note = source = /note="Description of Artificial Sequence: Synthetic oligonucleotide"
  source 1..20: mol_type = other RNA
cttgttaaggaccaaataaa

SEQ ID NO: 4469 - RNA, 20 nt, synthetic construct
  misc_feature 1..20: note = source = /note="Description of Artificial Sequence: Synthetic oligonucleotide"
  source 1..20: mol_type = other RNA
gaccaaataaatggtatttg

SEQ ID NO: 4470 - RNA, 20 nt, synthetic construct
  misc_feature 1..20: note = source = /note="Description of Artificial Sequence: Synthetic oligonucleotide"
  source 1..20: mol_type = other RNA
aagtgagtacctcctgcacc

SEQ ID NO: 4471 - RNA, 20 nt, synthetic construct
  misc_feature 1..20: note = source = /note="Description of Artificial Sequence: Synthetic oligonucleotide"
  source 1..20: mol_type = other RNA
tagtcagtcttgtgacaatt

SEQ ID NO: 4472 - RNA, 20 nt, synthetic construct
  misc_feature 1..20: note = source = /note="Description of Artificial Sequence: Synthetic oligonucleotide"
  source 1..20: mol_type = other RNA
actagcagagaactaaatta

SEQ ID NO: 4473 - RNA, 20 nt, synthetic construct
  misc_feature 1..20: note = source = /note="Description of Artificial Sequence: Synthetic oligonucleotide"
  source 1..20: mol_type = other RNA
cagagaactaaattatggaa

SEQ ID NO: 4474 - RNA, 20 nt, synthetic construct
  misc_feature 1..20: note = source = /note="Description of Artificial Sequence: Synthetic oligonucleotide"
  source 1..20: mol_type = other RNA
attatggaatggcagatctc

SEQ ID NO: 4475 - RNA, 20 nt, synthetic construct
  misc_feature 1..20: note = source = /note="Description of Artificial Sequence: Synthetic oligonucleotide"
  source 1..20: mol_type = other RNA
cagctatgtgattttacata

SEQ ID NO: 4476 - RNA, 20 nt, synthetic construct
  misc_feature 1..20: note = source = /note="Description of Artificial Sequence: Synthetic oligonucleotide"
  source 1..20: mol_type = other RNA
tacatacggtttgtttttaa

SEQ ID NO: 4477 - RNA, 20 nt, synthetic construct
  misc_feature 1..20: note = source = /note="Description of Artificial Sequence: Synthetic oligonucleotide"
  source 1..20: mol_type = other RNA
taatggatagagacagagtc

SEQ ID NO: 4478 - RNA, 20 nt, synthetic construct
  misc_feature 1..20: note = source = /note="Description of Artificial Sequence: Synthetic oligonucleotide"
  source 1..20: mol_type = other RNA
agagtctggctatgttgccc

SEQ ID NO: 4479 - RNA, 20 nt, synthetic construct
  misc_feature 1..20: note = source = /note="Description of Artificial Sequence: Synthetic oligonucleotide"
  source 1..20: mol_type = other RNA
ccaggctgctctgaaactcc

SEQ ID NO: 4480 - RNA, 20 nt, synthetic construct
  misc_feature 1..20: note = source = /note="Description of Artificial Sequence: Synthetic oligonucleotide"
  source 1..20: mol_type = other RNA
caggctgctctgaaactcct

SEQ ID NO: 4481 - RNA, 20 nt, synthetic construct
  misc_feature 1..20: note = source = /note="Description of Artificial Sequence: Synthetic oligonucleotide"
  source 1..20: mol_type = other RNA
catcctgccttagcctctta

SEQ ID NO: 4482 - RNA, 20 nt, synthetic construct
  misc_feature 1..20: note = source = /note="Description of Artificial Sequence: Synthetic oligonucleotide"
  source 1..20: mol_type = other RNA
gccttagcctcttaaggagc

SEQ ID NO: 4483 - RNA, 20 nt, synthetic construct
  misc_feature 1..20: note = source = /note="Description of Artificial Sequence: Synthetic oligonucleotide"
  source 1..20: mol_type = other RNA
ccttagcctcttaaggagct

SEQ ID NO: 4484 - RNA, 20 nt, synthetic construct
  misc_feature 1..20: note = source = /note="Description of Artificial Sequence: Synthetic oligonucleotide"
  source 1..20: mol_type = other RNA
tcttaaggagctgggattac

SEQ ID NO: 4485 - RNA, 20 nt, synthetic construct
  misc_feature 1..20: note = source = /note="Description of Artificial Sequence: Synthetic oligonucleotide"
  source 1..20: mol_type = other RNA
gattacaggtgcatgccccc

SEQ ID NO: 4486 - RNA, 20 nt, synthetic construct
  misc_feature 1..20: note = source = /note="Description of Artificial Sequence: Synthetic oligonucleotide"
  source 1..20: mol_type = other RNA
tctgaaaatacaaaagaaag

SEQ ID NO: 4487 - RNA, 20 nt, synthetic construct
  misc_feature 1..20: note = source = /note="Description of Artificial Sequence: Synthetic oligonucleotide"
  source 1..20: mol_type = other RNA
ctgaaaatacaaaagaaaga

SEQ ID NO: 4488 - RNA, 20 nt, synthetic construct
  misc_feature 1..20: note = source = /note="Description of Artificial Sequence: Synthetic oligonucleotide"
  source 1..20: mol_type = other RNA
ctgctgagtgtcccaaccta

SEQ ID NO: 4489 - RNA, 20 nt, synthetic construct
  misc_feature 1..20: note = source = /note="Description of Artificial Sequence: Synthetic oligonucleotide"
  source 1..20: mol_type = other RNA
tgctgagtgtcccaacctaa

SEQ ID NO: 4490 - RNA, 20 nt, synthetic construct
  misc_feature 1..20: note = source = /note="Description of Artificial Sequence: Synthetic oligonucleotide"
  source 1..20: mol_type = other RNA
atatatgcatgtatagaagt

SEQ ID NO: 4491 - RNA, 20 nt, synthetic construct
  misc_feature 1..20: note = source = /note="Description of Artificial Sequence: Synthetic oligonucleotide"
  source 1..20: mol_type = other RNA
tatatgcatgtatagaagta

SEQ ID NO: 4492 - RNA, 20 nt, synthetic construct
  misc_feature 1..20: note = source = /note="Description of Artificial Sequence: Synthetic oligonucleotide"
  source 1..20: mol_type = other RNA
taaaattatagagacattgc

SEQ ID NO: 4493 - RNA, 20 nt, synthetic construct
  misc_feature 1..20: note = source = /note="Description of Artificial Sequence: Synthetic oligonucleotide"
  source 1..20: mol_type = other RNA
agacattgcaggagagactc

SEQ ID NO: 4494 - RNA, 20 nt, synthetic construct
  misc_feature 1..20: note = source = /note="Description of Artificial Sequence: Synthetic oligonucleotide"
  source 1..20: mol_type = other RNA
ctctggattagatagaaaaa

SEQ ID NO: 4495 - RNA, 20 nt, synthetic construct
  misc_feature 1..20: note = source = /note="Description of Artificial Sequence: Synthetic oligonucleotide"
  source 1..20: mol_type = other RNA
gatagaaaaaaggaagaatt

SEQ ID NO: 4496 - RNA, 20 nt, synthetic construct
  misc_feature 1..20: note = source = /note="Description of Artificial Sequence: Synthetic oligonucleotide"
  source 1..20: mol_type = other RNA
ttgtctataatccttttagt

SEQ ID NO: 4497 - RNA, 20 nt, synthetic construct
  misc_feature 1..20: note = source = /note="Description of Artificial Sequence: Synthetic oligonucleotide"
  source 1..20: mol_type = other RNA
tgccttactgcagacacctg

SEQ ID NO: 4498 - RNA, 20 nt, synthetic construct
  misc_feature 1..20: note = source = /note="Description of Artificial Sequence: Synthetic oligonucleotide"
  source 1..20: mol_type = other RNA
atacttctcagagactgttc

SEQ ID NO: 4499 - RNA, 20 nt, synthetic construct
  misc_feature 1..20: note = source = /note="Description of Artificial Sequence: Synthetic oligonucleotide"
  source 1..20: mol_type = other RNA
agttgaactcccatgattcc

SEQ ID NO: 4500 - RNA, 20 nt, synthetic construct
  misc_feature 1..20: note = source = /note="Description of Artificial Sequence: Synthetic oligonucleotide"
  source 1..20: mol_type = other RNA
tgttgccattttcaagacac

SEQ ID NO: 4501 - RNA, 20 nt, synthetic construct
  misc_feature 1..20: note = source = /note="Description of Artificial Sequence: Synthetic oligonucleotide"
  source 1..20: mol_type = other RNA
gttgccattttcaagacaca

SEQ ID NO: 4502 - RNA, 20 nt, synthetic construct
  misc_feature 1..20: note = source = /note="Description of Artificial Sequence: Synthetic oligonucleotide"
  source 1..20: mol_type = other RNA
tctagattacctctctacct

SEQ ID NO: 4503 - RNA, 20 nt, synthetic construct
  misc_feature 1..20: note = source = /note="Description of Artificial Sequence: Synthetic oligonucleotide"
  source 1..20: mol_type = other RNA
ctagattacctctctacctt

SEQ ID NO: 4504 - RNA, 20 nt, synthetic construct
  misc_feature 1..20: note = source = /note="Description of Artificial Sequence: Synthetic oligonucleotide"
  source 1..20: mol_type = other RNA
gaattttaagtcactctgtg

SEQ ID NO: 4505 - RNA, 20 nt, synthetic construct
  misc_feature 1..20: note = source = /note="Description of Artificial Sequence: Synthetic oligonucleotide"
  source 1..20: mol_type = other RNA
aattttaagtcactctgtga

SEQ ID NO: 4506 - RNA, 20 nt, synthetic construct
  misc_feature 1..20: note = source = /note="Description of Artificial Sequence: Synthetic oligonucleotide"
  source 1..20: mol_type = other RNA
tcctctttcccctctcatgc

SEQ ID NO: 4507 - RNA, 20 nt, synthetic construct
  misc_feature 1..20: note = source = /note="Description of Artificial Sequence: Synthetic oligonucleotide"
  source 1..20: mol_type = other RNA
ctctcatgctggaaaatctt

SEQ ID NO: 4508 - RNA, 20 nt, synthetic construct
  misc_feature 1..20: note = source = /note="Description of Artificial Sequence: Synthetic oligonucleotide"
  source 1..20: mol_type = other RNA
ctgagagcgcatttttaaga

SEQ ID NO: 4509 - RNA, 20 nt, synthetic construct
  misc_feature 1..20: note = source = /note="Description of Artificial Sequence: Synthetic oligonucleotide"
  source 1..20: mol_type = other RNA
ctcttcttgaacgttaagcc

SEQ ID NO: 4510 - RNA, 20 nt, synthetic construct
  misc_feature 1..20: note = source = /note="Description of Artificial Sequence: Synthetic oligonucleotide"
  source 1..20: mol_type = other RNA
tcttcttgaacgttaagcct

SEQ ID NO: 4511 - RNA, 20 nt, synthetic construct
  misc_feature 1..20: note = source = /note="Description of Artificial Sequence: Synthetic oligonucleotide"
  source 1..20: mol_type = other RNA
ttgaacgttaagcctgggta

SEQ ID NO: 4512 - RNA, 20 nt, synthetic construct
  misc_feature 1..20: note = source = /note="Description of Artificial Sequence: Synthetic oligonucleotide"
  source 1..20: mol_type = other RNA
gaataaagtgcagaagttta

SEQ ID NO: 4513 - RNA, 20 nt, synthetic construct
  misc_feature 1..20: note = source = /note="Description of Artificial Sequence: Synthetic oligonucleotide"
  source 1..20: mol_type = other RNA
aattaaaatattagccattg

SEQ ID NO: 4514 - RNA, 20 nt, synthetic construct
  misc_feature 1..20: note = source = /note="Description of Artificial Sequence: Synthetic oligonucleotide"
  source 1..20: mol_type = other RNA
attaaaatattagccattga

SEQ ID NO: 4515 - RNA, 20 nt, synthetic construct
  misc_feature 1..20: note = source = /note="Description of Artificial Sequence: Synthetic oligonucleotide"
  source 1..20: mol_type = other RNA
atattagccattgagggaaa

SEQ ID NO: 4516 - RNA, 20 nt, synthetic construct
  misc_feature 1..20: note = source = /note="Description of Artificial Sequence: Synthetic oligonucleotide"
  source 1..20: mol_type = other RNA
attgagggaaaaggttttac

SEQ ID NO: 4517 - RNA, 20 nt, synthetic construct
  misc_feature 1..20: note = source = /note="Description of Artificial Sequence: Synthetic oligonucleotide"
  source 1..20: mol_type = other RNA
gttttacaggtagctctctg

SEQ ID NO: 4518 - RNA, 20 nt, synthetic construct
  misc_feature 1..20: note = source = /note="Description of Artificial Sequence: Synthetic oligonucleotide"
  source 1..20: mol_type = other RNA
tgcatttaattttttacagt

SEQ ID NO: 4519 - RNA, 20 nt, synthetic construct
  misc_feature 1..20: note = source = /note="Description of Artificial Sequence: Synthetic oligonucleotide"
  source 1..20: mol_type = other RNA
ttatttttagtacatttatt

SEQ ID NO: 4520 - RNA, 20 nt, synthetic construct
  misc_feature 1..20: note = source = /note="Description of Artificial Sequence: Synthetic oligonucleotide"
  source 1..20: mol_type = other RNA
atttattaggaatgtgttct

SEQ ID NO: 4521 - RNA, 20 nt, synthetic construct
  misc_feature 1..20: note = source = /note="Description of Artificial Sequence: Synthetic oligonucleotide"
  source 1..20: mol_type = other RNA
tttattaggaatgtgttctt

SEQ ID NO: 4522 - RNA, 20 nt, synthetic construct
  misc_feature 1..20: note = source = /note="Description of Artificial Sequence: Synthetic oligonucleotide"
  source 1..20: mol_type = other RNA
tctgtaagccctgctttaaa

SEQ ID NO: 4523 - RNA, 20 nt, synthetic construct
  misc_feature 1..20: note = source = /note="Description of Artificial Sequence: Synthetic oligonucleotide"
  source 1..20: mol_type = other RNA
taaatggcaaagaagaaagt

SEQ ID NO: 4524 - RNA, 20 nt, synthetic construct
  misc_feature 1..20: note = source = /note="Description of Artificial Sequence: Synthetic oligonucleotide"
  source 1..20: mol_type = other RNA
aggtaataatagataataac

SEQ ID NO: 4525 - RNA, 20 nt, synthetic construct
  misc_feature 1..20: note = source = /note="Description of Artificial Sequence: Synthetic oligonucleotide"
  source 1..20: mol_type = other RNA
gtaagttctcaattttatat

SEQ ID NO: 4526 - RNA, 20 nt, synthetic construct
  misc_feature 1..20: note = source = /note="Description of Artificial Sequence: Synthetic oligonucleotide"
  source 1..20: mol_type = other RNA
ttgagcacctgccaaatacc

SEQ ID NO: 4527 - RNA, 20 nt, synthetic construct
  misc_feature 1..20: note = source = /note="Description of Artificial Sequence: Synthetic oligonucleotide"
  source 1..20: mol_type = other RNA
caaataccaggcactcttct

SEQ ID NO: 4528 - RNA, 20 nt, synthetic construct
  misc_feature 1..20: note = source = /note="Description of Artificial Sequence: Synthetic oligonucleotide"
  source 1..20: mol_type = other RNA
cactcttctaggaactagag

SEQ ID NO: 4529 - RNA, 20 nt, synthetic construct
  misc_feature 1..20: note = source = /note="Description of Artificial Sequence: Synthetic oligonucleotide"
  source 1..20: mol_type = other RNA
gagtggcattaatgagtaag

SEQ ID NO: 4530 - RNA, 20 nt, synthetic construct
  misc_feature 1..20: note = source = /note="Description of Artificial Sequence: Synthetic oligonucleotide"
  source 1..20: mol_type = other RNA
taaaaatgtaaagcagaaaa

SEQ ID NO: 4531 - RNA, 20 nt, synthetic construct
  misc_feature 1..20: note = source = /note="Description of Artificial Sequence: Synthetic oligonucleotide"
  source 1..20: mol_type = other RNA
agcagaaaaaggaaattgag

SEQ ID NO: 4532 - RNA, 20 nt, synthetic construct
  misc_feature 1..20: note = source = /note="Description of Artificial Sequence: Synthetic oligonucleotide"
  source 1..20: mol_type = other RNA
gaaaaaggaaattgagtggc

SEQ ID NO: 4533 - RNA, 20 nt, synthetic construct
  misc_feature 1..20: note = source = /note="Description of Artificial Sequence: Synthetic oligonucleotide"
  source 1..20: mol_type = other RNA
aaaaaggaaattgagtggca

SEQ ID NO: 4534 - RNA, 20 nt, synthetic construct
  misc_feature 1..20: note = source = /note="Description of Artificial Sequence: Synthetic oligonucleotide"
  source 1..20: mol_type = other RNA
ggaaattgagtggcagggtt

SEQ ID NO: 4535 - RNA, 20 nt, synthetic construct
  misc_feature 1..20: note = source = /note="Description of Artificial Sequence: Synthetic oligonucleotide"
  source 1..20: mol_type = other RNA
gaagatatagtagtcaagta

SEQ ID NO: 4536 - RNA, 20 nt, synthetic construct
  misc_feature 1..20: note = source = /note="Description of Artificial Sequence: Synthetic oligonucleotide"
  source 1..20: mol_type = other RNA
caagccatgaagttatctga

SEQ ID NO: 4537 - RNA, 20 nt, synthetic construct
  misc_feature 1..20: note = source = /note="Description of Artificial Sequence: Synthetic oligonucleotide"
  source 1..20: mol_type = other RNA
aagttatctgaaggaattgc

SEQ ID NO: 4538 - RNA, 20 nt, synthetic construct
  misc_feature 1..20: note = source = /note="Description of Artificial Sequence: Synthetic oligonucleotide"
  source 1..20: mol_type = other RNA
tctgaaggaattgcaggtag

SEQ ID NO: 4539 - RNA, 20 nt, synthetic construct
  misc_feature 1..20: note = source = /note="Description of Artificial Sequence: Synthetic oligonucleotide"
  source 1..20: mol_type = other RNA
tggagaacagccaaaagacc

SEQ ID NO: 4540 - RNA, 20 nt, synthetic construct
  misc_feature 1..20: note = source = /note="Description of Artificial Sequence: Synthetic oligonucleotide"
  source 1..20: mol_type = other RNA
aaaagacctggagtagtaaa

SEQ ID NO: 4541 - RNA, 20 nt, synthetic construct
  misc_feature 1..20: note = source = /note="Description of Artificial Sequence: Synthetic oligonucleotide"
  source 1..20: mol_type = other RNA
atacacttaagtaagtgata

SEQ ID NO: 4542 - RNA, 20 nt, synthetic construct
  misc_feature 1..20: note = source = /note="Description of Artificial Sequence: Synthetic oligonucleotide"
  source 1..20: mol_type = other RNA
agtgatatggacaagaactt

SEQ ID NO: 4543 - RNA, 20 nt, synthetic construct
  misc_feature 1..20: note = source = /note="Description of Artificial Sequence: Synthetic oligonucleotide"
  source 1..20: mol_type = other RNA
actttggaagttgaatagca

SEQ ID NO: 4544 - RNA, 20 nt, synthetic construct
  misc_feature 1..20: note = source = /note="Description of Artificial Sequence: Synthetic oligonucleotide"
  source 1..20: mol_type = other RNA
gttgaatagcaaggtccatc

SEQ ID NO: 4545 - RNA, 20 nt, synthetic construct
  misc_feature 1..20: note = source = /note="Description of Artificial Sequence: Synthetic oligonucleotide"
  source 1..20: mol_type = other RNA
gtccatctggactataacag

SEQ ID NO: 4546 - RNA, 20 nt, synthetic construct
  misc_feature 1..20: note = source = /note="Description of Artificial Sequence: Synthetic oligonucleotide"
  source 1..20: mol_type = other RNA
catctggactataacagagg

SEQ ID NO: 4547 - RNA, 20 nt, synthetic construct
  misc_feature 1..20: note = source = /note="Description of Artificial Sequence: Synthetic oligonucleotide"
  source 1..20: mol_type = other RNA
taacagaggaggcttcacaa

SEQ ID NO: 4548 - RNA, 20 nt, synthetic construct
  misc_feature 1..20: note = source = /note="Description of Artificial Sequence: Synthetic oligonucleotide"
  source 1..20: mol_type = other RNA
agaggaggcttcacaaagga

SEQ ID NO: 4549 - RNA, 20 nt, synthetic construct
  misc_feature 1..20: note = source = /note="Description of Artificial Sequence: Synthetic oligonucleotide"
  source 1..20: mol_type = other RNA
gcttcacaaaggaaggtgac

SEQ ID NO: 4550 - RNA, 20 nt, synthetic construct
  misc_feature 1..20: note = source = /note="Description of Artificial Sequence: Synthetic oligonucleotide"
  source 1..20: mol_type = other RNA
cttcacaaaggaaggtgaca

SEQ ID NO: 4551 - RNA, 20 nt, synthetic construct
  misc_feature 1..20: note = source = /note="Description of Artificial Sequence: Synthetic oligonucleotide"
  source 1..20: mol_type = other RNA
caaaggaaggtgacagggca

SEQ ID NO: 4552 - RNA, 20 nt, synthetic construct
  misc_feature 1..20: note = source = /note="Description of Artificial Sequence: Synthetic oligonucleotide"
  source 1..20: mol_type = other RNA
gaaggtgacagggcatggcc

SEQ ID NO: 4553 - RNA, 20 nt, synthetic construct
  misc_feature 1..20: note = source = /note="Description of Artificial Sequence: Synthetic oligonucleotide"
  source 1..20: mol_type = other RNA
gggcatggcctggatcctga

SEQ ID NO: 4554 - RNA, 20 nt, synthetic construct
  misc_feature 1..20: note = source = /note="Description of Artificial Sequence: Synthetic oligonucleotide"
  source 1..20: mol_type = other RNA
tggcctggatcctgaaggac

SEQ ID NO: 4555 - RNA, 20 nt, synthetic construct
  misc_feature 1..20: note = source = /note="Description of Artificial Sequence: Synthetic oligonucleotide"
  source 1..20: mol_type = other RNA
tcctgaaggacaggaagaat

SEQ ID NO: 4556 - RNA, 20 nt, synthetic construct
  misc_feature 1..20: note = source = /note="Description of Artificial Sequence: Synthetic oligonucleotide"
  source 1..20: mol_type = other RNA
cctgaaggacaggaagaatt

SEQ ID NO: 4557 - RNA, 20 nt, synthetic construct
  misc_feature 1..20: note = source = /note="Description of Artificial Sequence: Synthetic oligonucleotide"
  source 1..20: mol_type = other RNA
aacaaagaatgacatcccag

SEQ ID NO: 4558 - RNA, 20 nt, synthetic construct
  misc_feature 1..20: note = source = /note="Description of Artificial Sequence: Synthetic oligonucleotide"
  source 1..20: mol_type = other RNA
gacatcccagtggagagaag

SEQ ID NO: 4559 - RNA, 20 nt, synthetic construct
  misc_feature 1..20: note = source = /note="Description of Artificial Sequence: Synthetic oligonucleotide"
  source 1..20: mol_type = other RNA
atcccagtggagagaagtgg

SEQ ID NO: 4560 - RNA, 20 nt, synthetic construct
  misc_feature 1..20: note = source = /note="Description of Artificial Sequence: Synthetic oligonucleotide"
  source 1..20: mol_type = other RNA
tcccagtggagagaagtgga

SEQ ID NO: 4561 - RNA, 20 nt, synthetic construct
  misc_feature 1..20: note = source = /note="Description of Artificial Sequence: Synthetic oligonucleotide"
  source 1..20: mol_type = other RNA
cccagtggagagaagtggag

SEQ ID NO: 4562 - RNA, 20 nt, synthetic construct
  misc_feature 1..20: note = source = /note="Description of Artificial Sequence: Synthetic oligonucleotide"
  source 1..20: mol_type = other RNA
ggaggggaaacagcatgaaa

SEQ ID NO: 4563 - RNA, 20 nt, synthetic construct
  misc_feature 1..20: note = source = /note="Description of Artificial Sequence: Synthetic oligonucleotide"
  source 1..20: mol_type = other RNA
atggagtgaaataagaatgt

SEQ ID NO: 4564 - RNA, 20 nt, synthetic construct
  misc_feature 1..20: note = source = /note="Description of Artificial Sequence: Synthetic oligonucleotide"
  source 1..20: mol_type = other RNA
aaataagaatgttggccttt

SEQ ID NO: 4565 - RNA, 20 nt, synthetic construct
  misc_feature 1..20: note = source = /note="Description of Artificial Sequence: Synthetic oligonucleotide"
  source 1..20: mol_type = other RNA
aataagaatgttggccttta

SEQ ID NO: 4566 - RNA, 20 nt, synthetic construct
  misc_feature 1..20: note = source = /note="Description of Artificial Sequence: Synthetic oligonucleotide"
  source 1..20: mol_type = other RNA
agaatgttggcctttagggc

SEQ ID NO: 4567 - RNA, 20 nt, synthetic construct
  misc_feature 1..20: note = source = /note="Description of Artificial Sequence: Synthetic oligonucleotide"
  source 1..20: mol_type = other RNA
gttggcctttagggcaggaa

SEQ ID NO: 4568 - RNA, 20 nt, synthetic construct
  misc_feature 1..20: note = source = /note="Description of Artificial Sequence: Synthetic oligonucleotide"
  source 1..20: mol_type = other RNA
ttggcctttagggcaggaat

SEQ ID NO: 4569 - RNA, 20 nt, synthetic construct
  misc_feature 1..20: note = source = /note="Description of Artificial Sequence: Synthetic oligonucleotide"
  source 1..20: mol_type = other RNA
ctttagggcaggaatgggcc

SEQ ID NO: 4570 - RNA, 20 nt, synthetic construct
  misc_feature 1..20: note = source = /note="Description of Artificial Sequence: Synthetic oligonucleotide"
  source 1..20: mol_type = other RNA
ggcaggaatgggccaggcag

SEQ ID NO: 4571 - RNA, 20 nt, synthetic construct
  misc_feature 1..20: note = source = /note="Description of Artificial Sequence: Synthetic oligonucleotide"
  source 1..20: mol_type = other RNA
gcaggaatgggccaggcaga

SEQ ID NO: 4572 - RNA, 20 nt, synthetic construct
  misc_feature 1..20: note = source = /note="Description of Artificial Sequence: Synthetic oligonucleotide"
  source 1..20: mol_type = other RNA
tgggccaggcagagggcaag

SEQ ID NO: 4573 - RNA, 20 nt, synthetic construct
  misc_feature 1..20: note = source = /note="Description of Artificial Sequence: Synthetic oligonucleotide"
  source 1..20: mol_type = other RNA
gggccaggcagagggcaagt

SEQ ID NO: 4574 - RNA, 20 nt, synthetic construct
  misc_feature 1..20: note = source = /note="Description of Artificial Sequence: Synthetic oligonucleotide"
  source 1..20: mol_type = other RNA
gcagagggcaagtgggaagc

SEQ ID NO: 4575 - RNA, 20 nt, synthetic construct
  misc_feature 1..20: note = source = /note="Description of Artificial Sequence: Synthetic oligonucleotide"
  source 1..20: mol_type = other RNA
gcaagtgggaagcaggaaaa

SEQ ID NO: 4576 - RNA, 20 nt, synthetic construct
  misc_feature 1..20: note = source = /note="Description of Artificial Sequence: Synthetic oligonucleotide"
  source 1..20: mol_type = other RNA
accttgtataaagttcatgt

SEQ ID NO: 4577 - RNA, 20 nt, synthetic construct
  misc_feature 1..20: note = source = /note="Description of Artificial Sequence: Synthetic oligonucleotide"
  source 1..20: mol_type = other RNA
gttggcaaatagagagaaga

SEQ ID NO: 4578 - RNA, 20 nt, synthetic construct
  misc_feature 1..20: note = source = /note="Description of Artificial Sequence: Synthetic oligonucleotide"
  source 1..20: mol_type = other RNA
ttggcaaatagagagaagat

SEQ ID NO: 4579 - RNA, 20 nt, synthetic construct
  misc_feature 1..20: note = source = /note="Description of Artificial Sequence: Synthetic oligonucleotide"
  source 1..20: mol_type = other RNA
tagagagaagatgggaaagc

SEQ ID NO: 4580 - RNA, 20 nt, synthetic construct
  misc_feature 1..20: note = source = /note="Description of Artificial Sequence: Synthetic oligonucleotide"
  source 1..20: mol_type = other RNA
agagagaagatgggaaagca

SEQ ID NO: 4581 - RNA, 20 nt, synthetic construct
  misc_feature 1..20: note = source = /note="Description of Artificial Sequence: Synthetic oligonucleotide"
  source 1..20: mol_type = other RNA
gaagatgggaaagcagggta

SEQ ID NO: 4582 - RNA, 20 nt, synthetic construct
  misc_feature 1..20: note = source = /note="Description of Artificial Sequence: Synthetic oligonucleotide"
  source 1..20: mol_type = other RNA
gcatgctatcctgaaaatat

SEQ ID NO: 4583 - RNA, 20 nt, synthetic construct
  misc_feature 1..20: note = source = /note="Description of Artificial Sequence: Synthetic oligonucleotide"
  source 1..20: mol_type = other RNA
catgctatcctgaaaatatt

SEQ ID NO: 4584 - RNA, 20 nt, synthetic construct
  misc_feature 1..20: note = source = /note="Description of Artificial Sequence: Synthetic oligonucleotide"
  source 1..20: mol_type = other RNA
atgctatcctgaaaatattg

SEQ ID NO: 4585 - RNA, 20 nt, synthetic construct
  misc_feature 1..20: note = source = /note="Description of Artificial Sequence: Synthetic oligonucleotide"
  source 1..20: mol_type = other RNA
attagagcagatgagtagaa

SEQ ID NO: 4586 - RNA, 20 nt, synthetic construct
  misc_feature 1..20: note = source = /note="Description of Artificial Sequence: Synthetic oligonucleotide"
  source 1..20: mol_type = other RNA
tttacaaatttaaacaaata

SEQ ID NO: 4587 - RNA, 20 nt, synthetic construct
  misc_feature 1..20: note = source = /note="Description of Artificial Sequence: Synthetic oligonucleotide"
  source 1..20: mol_type = other RNA
aatttaaacaaataaggaaa

SEQ ID NO: 4588 - RNA, 20 nt, synthetic construct
  misc_feature 1..20: note = source = /note="Description of Artificial Sequence: Synthetic oligonucleotide"
  source 1..20: mol_type = other RNA
ttaaacaaataaggaaatgg

SEQ ID NO: 4589 - RNA, 20 nt, synthetic construct
  misc_feature 1..20: note = source = /note="Description of Artificial Sequence: Synthetic oligonucleotide"
  source 1..20: mol_type = other RNA
aaggaaatggaggcagtagt

SEQ ID NO: 4590 - RNA, 20 nt, synthetic construct
  misc_feature 1..20: note = source = /note="Description of Artificial Sequence: Synthetic oligonucleotide"
  source 1..20: mol_type = other RNA
ggcagtagttggagtaattt

SEQ ID NO: 4591 - RNA, 20 nt, synthetic construct
  misc_feature 1..20: note = source = /note="Description of Artificial Sequence: Synthetic oligonucleotide"
  source 1..20: mol_type = other RNA
tttaggagataaattgaaaa

SEQ ID NO: 4592 - RNA, 20 nt, synthetic construct
  misc_feature 1..20: note = source = /note="Description of Artificial Sequence: Synthetic oligonucleotide"
  source 1..20: mol_type = other RNA
atggattttgttaagagaga

SEQ ID NO: 4593 - RNA, 20 nt, synthetic construct
  misc_feature 1..20: note = source = /note="Description of Artificial Sequence: Synthetic oligonucleotide"
  source 1..20: mol_type = other RNA
tggattttgttaagagagaa

SEQ ID NO: 4594 - RNA, 20 nt, synthetic construct
  misc_feature 1..20: note = source = /note="Description of Artificial Sequence: Synthetic oligonucleotide"
  source 1..20: mol_type = other RNA
gatagattttatatatttta

SEQ ID NO: 4595 - RNA, 20 nt, synthetic construct
  misc_feature 1..20: note = source = /note="Description of Artificial Sequence: Synthetic oligonucleotide"
  source 1..20: mol_type = other RNA
tattttaaggaaaaatcatg

SEQ ID NO: 4596 - RNA, 20 nt, synthetic construct
  misc_feature 1..20: note = source = /note="Description of Artificial Sequence: Synthetic oligonucleotide"
  source 1..20: mol_type = other RNA
gcacgtaagagataaaagag

SEQ ID NO: 4597 - RNA, 20 nt, synthetic construct
  misc_feature 1..20: note = source = /note="Description of Artificial Sequence: Synthetic oligonucleotide"
  source 1..20: mol_type = other RNA
caaaatgattaattacgtgt

SEQ ID NO: 4598 - RNA, 20 nt, synthetic construct
  misc_feature 1..20: note = source = /note="Description of Artificial Sequence: Synthetic oligonucleotide"
  source 1..20: mol_type = other RNA
gtgttggtattaaaagaaat

SEQ ID NO: 4599 - RNA, 20 nt, synthetic construct
  misc_feature 1..20: note = source = /note="Description of Artificial Sequence: Synthetic oligonucleotide"
  source 1..20: mol_type = other RNA
tgttggtattaaaagaaata

SEQ ID NO: 4600 - RNA, 20 nt, synthetic construct
  misc_feature 1..20: note = source = /note="Description of Artificial Sequence: Synthetic oligonucleotide"
  source 1..20: mol_type = other RNA
attaaaagaaatagggaagt

SEQ ID NO: 4601 - RNA, 20 nt, synthetic construct
  misc_feature 1..20: note = source = /note="Description of Artificial Sequence: Synthetic oligonucleotide"
  source 1..20: mol_type = other RNA
ttaaaagaaatagggaagtt

SEQ ID NO: 4602 - RNA, 20 nt, synthetic construct
  misc_feature 1..20: note = source = /note="Description of Artificial Sequence: Synthetic oligonucleotide"
  source 1..20: mol_type = other RNA
atcagatgcagatattctta

SEQ ID NO: 4603 - RNA, 20 nt, synthetic construct
  misc_feature 1..20: note = source = /note="Description of Artificial Sequence: Synthetic oligonucleotide"
  source 1..20: mol_type = other RNA
tcatttgatatttgtcatat

SEQ ID NO: 4604 - RNA, 20 nt, synthetic construct
  misc_feature 1..20: note = source = /note="Description of Artificial Sequence: Synthetic oligonucleotide"
  source 1..20: mol_type = other RNA
tttgtatttttataataagt

SEQ ID NO: 4605 - RNA, 20 nt, synthetic construct
  misc_feature 1..20: note = source = /note="Description of Artificial Sequence: Synthetic oligonucleotide"
  source 1..20: mol_type = other RNA
gaatcaaaaaattattgatt

SEQ ID NO: 4606 - RNA, 20 nt, synthetic construct
  misc_feature 1..20: note = source = /note="Description of Artificial Sequence: Synthetic oligonucleotide"
  source 1..20: mol_type = other RNA
agtccaattagttcattttg

SEQ ID NO: 4607 - RNA, 20 nt, synthetic construct
  misc_feature 1..20: note = source = /note="Description of Artificial Sequence: Synthetic oligonucleotide"
  source 1..20: mol_type = other RNA
caattagttcattttgtgga

SEQ ID NO: 4608 - RNA, 20 nt, synthetic construct
  misc_feature 1..20: note = source = /note="Description of Artificial Sequence: Synthetic oligonucleotide"
  source 1..20: mol_type = other RNA
ttcattttgtggaaggaaaa

SEQ ID NO: 4609 - RNA, 20 nt, synthetic construct
  misc_feature 1..20: note = source = /note="Description of Artificial Sequence: Synthetic oligonucleotide"
  source 1..20: mol_type = other RNA
cctctagctagtatctaact

SEQ ID NO: 4610 - RNA, 20 nt, synthetic construct
  misc_feature 1..20: note = source = /note="Description of Artificial Sequence: Synthetic oligonucleotide"
  source 1..20: mol_type = other RNA
tatctaacttggtctagccc

SEQ ID NO: 4611 - RNA, 20 nt, synthetic construct
  misc_feature 1..20: note = source = /note="Description of Artificial Sequence: Synthetic oligonucleotide"
  source 1..20: mol_type = other RNA
aaataataaaaaagtattag

SEQ ID NO: 4612 - RNA, 20 nt, synthetic construct
  misc_feature 1..20: note = source = /note="Description of Artificial Sequence: Synthetic oligonucleotide"
  source 1..20: mol_type = other RNA
attagtggtttgtattttgc

SEQ ID NO: 4613 - RNA, 20 nt, synthetic construct
  misc_feature 1..20: note = source = /note="Description of Artificial Sequence: Synthetic oligonucleotide"
  source 1..20: mol_type = other RNA
gtattttgctggcttgcttg

SEQ ID NO: 4614 - RNA, 20 nt, synthetic construct
  misc_feature 1..20: note = source = /note="Description of Artificial Sequence: Synthetic oligonucleotide"
  source 1..20: mol_type = other RNA
ctggcttgcttgtggagaat

SEQ ID NO: 4615 - RNA, 20 nt, synthetic construct
  misc_feature 1..20: note = source = /note="Description of Artificial Sequence: Synthetic oligonucleotide"
  source 1..20: mol_type = other RNA
ttgtggagaataggattaga

SEQ ID NO: 4616 - RNA, 20 nt, synthetic construct
  misc_feature 1..20: note = source = /note="Description of Artificial Sequence: Synthetic oligonucleotide"
  source 1..20: mol_type = other RNA
tttatcttttcagtagtata

SEQ ID NO: 4617 - RNA, 20 nt, synthetic construct
  misc_feature 1..20: note = source = /note="Description of Artificial Sequence: Synthetic oligonucleotide"
  source 1..20: mol_type = other RNA
atcttttcagtagtataagg

SEQ ID NO: 4618 - RNA, 20 nt, synthetic construct
  misc_feature 1..20: note = source = /note="Description of Artificial Sequence: Synthetic oligonucleotide"
  source 1..20: mol_type = other RNA
agaaaaatagcttttcttat

SEQ ID NO: 4619 - RNA, 20 nt, synthetic construct
  misc_feature 1..20: note = source = /note="Description of Artificial Sequence: Synthetic oligonucleotide"
  source 1..20: mol_type = other RNA
ccaaaaaaccatcaccctac

SEQ ID NO: 4620 - RNA, 20 nt, synthetic construct
  misc_feature 1..20: note = source = /note="Description of Artificial Sequence: Synthetic oligonucleotide"
  source 1..20: mol_type = other RNA
tttgcttgattttcctgatc

SEQ ID NO: 4621 - RNA, 20 nt, synthetic construct
  misc_feature 1..20: note = source = /note="Description of Artificial Sequence: Synthetic oligonucleotide"
  source 1..20: mol_type = other RNA
cttcattgttacttccttac

SEQ ID NO: 4622 - RNA, 20 nt, synthetic construct
  misc_feature 1..20: note = source = /note="Description of Artificial Sequence: Synthetic oligonucleotide"
  source 1..20: mol_type = other RNA
cagtttattctttgagtcac

SEQ ID NO: 4623 - RNA, 20 nt, synthetic construct
  misc_feature 1..20: note = source = /note="Description of Artificial Sequence: Synthetic oligonucleotide"
  source 1..20: mol_type = other RNA
tctccattacacatgccaca

SEQ ID NO: 4624 - RNA, 20 nt, synthetic construct
  misc_feature 1..20: note = source = /note="Description of Artificial Sequence: Synthetic oligonucleotide"
  source 1..20: mol_type = other RNA
agcaaaaccactcttataca

SEQ ID NO: 4625 - RNA, 20 nt, synthetic construct
  misc_feature 1..20: note = source = /note="Description of Artificial Sequence: Synthetic oligonucleotide"
  source 1..20: mol_type = other RNA
ggtgtcttgcatatatatta

SEQ ID NO: 4626 - RNA, 20 nt, synthetic construct
  misc_feature 1..20: note = source = /note="Description of Artificial Sequence: Synthetic oligonucleotide"
  source 1..20: mol_type = other RNA
atatatattaaggcccagag

SEQ ID NO: 4627 - RNA, 20 nt, synthetic construct
  misc_feature 1..20: note = source = /note="Description of Artificial Sequence: Synthetic oligonucleotide"
  source 1..20: mol_type = other RNA
caagactgttgaccttcttg

SEQ ID NO: 4628 - RNA, 20 nt, synthetic construct
  misc_feature 1..20: note = source = /note="Description of Artificial Sequence: Synthetic oligonucleotide"
  source 1..20: mol_type = other RNA
tggcatttatctgacaacct

SEQ ID NO: 4629 - RNA, 20 nt, synthetic construct
  misc_feature 1..20: note = source = /note="Description of Artificial Sequence: Synthetic oligonucleotide"
  source 1..20: mol_type = other RNA
gtttcagtttcctcatcaaa

SEQ ID NO: 4630 - RNA, 20 nt, synthetic construct
  misc_feature 1..20: note = source = /note="Description of Artificial Sequence: Synthetic oligonucleotide"
  source 1..20: mol_type = other RNA
cagctgcctctgttgatctc

SEQ ID NO: 4631 - RNA, 20 nt, synthetic construct
  misc_feature 1..20: note = source = /note="Description of Artificial Sequence: Synthetic oligonucleotide"
  source 1..20: mol_type = other RNA
caggatcttttaagtagaaa

SEQ ID NO: 4632 - RNA, 20 nt, synthetic construct
  misc_feature 1..20: note = source = /note="Description of Artificial Sequence: Synthetic oligonucleotide"
  source 1..20: mol_type = other RNA
gaaaattgcaatgtaaatac

SEQ ID NO: 4633 - RNA, 20 nt, synthetic construct
  misc_feature 1..20: note = source = /note="Description of Artificial Sequence: Synthetic oligonucleotide"
  source 1..20: mol_type = other RNA
ctcaaaatgtgaaaatagta

SEQ ID NO: 4634 - RNA, 20 nt, synthetic construct
  misc_feature 1..20: note = source = /note="Description of Artificial Sequence: Synthetic oligonucleotide"
  source 1..20: mol_type = other RNA
cagttgtccttcagtatctg

SEQ ID NO: 4635 - RNA, 20 nt, synthetic construct
  misc_feature 1..20: note = source = /note="Description of Artificial Sequence: Synthetic oligonucleotide"
  source 1..20: mol_type = other RNA
agttgtccttcagtatctgt

SEQ ID NO: 4636 - RNA, 20 nt, synthetic construct
  misc_feature 1..20: note = source = /note="Description of Artificial Sequence: Synthetic oligonucleotide"
  source 1..20: mol_type = other RNA
cttcagtatctgtgggagat

SEQ ID NO: 4637 - RNA, 20 nt, synthetic construct
  misc_feature 1..20: note = source = /note="Description of Artificial Sequence: Synthetic oligonucleotide"
  source 1..20: mol_type = other RNA
atctgtgggagattggttcc

SEQ ID NO: 4638 - RNA, 20 nt, synthetic construct
  misc_feature 1..20: note = source = /note="Description of Artificial Sequence: Synthetic oligonucleotide"
  source 1..20: mol_type = other RNA
attggttccaggacccccca

SEQ ID NO: 4639 - RNA, 20 nt, synthetic construct
  misc_feature 1..20: note = source = /note="Description of Artificial Sequence: Synthetic oligonucleotide"
  source 1..20: mol_type = other RNA
cccatggatatcaaaatctg

SEQ ID NO: 4640 - RNA, 20 nt, synthetic construct
  misc_feature 1..20: note = source = /note="Description of Artificial Sequence: Synthetic oligonucleotide"
  source 1..20: mol_type = other RNA
gttattacactgtattgttt

SEQ ID NO: 4641 - RNA, 20 nt, synthetic construct
  misc_feature 1..20: note = source = /note="Description of Artificial Sequence: Synthetic oligonucleotide"
  source 1..20: mol_type = other RNA
ttattacactgtattgttta

SEQ ID NO: 4642 - RNA, 20 nt, synthetic construct
  misc_feature 1..20: note = source = /note="Description of Artificial Sequence: Synthetic oligonucleotide"
  source 1..20: mol_type = other RNA
ttgattgaatccacagatgc

SEQ ID NO: 4643 - RNA, 20 nt, synthetic construct
  misc_feature 1..20: note = source = /note="Description of Artificial Sequence: Synthetic oligonucleotide"
  source 1..20: mol_type = other RNA
ctggaatccatgaataccca

SEQ ID NO: 4644 - RNA, 20 nt, synthetic construct
  misc_feature 1..20: note = source = /note="Description of Artificial Sequence: Synthetic oligonucleotide"
  source 1..20: mol_type = other RNA
tggaatccatgaatacccat

SEQ ID NO: 4645 - RNA, 20 nt, synthetic construct
  misc_feature 1..20: note = source = /note="Description of Artificial Sequence: Synthetic oligonucleotide"
  source 1..20: mol_type = other RNA
ggaatccatgaatacccatg

SEQ ID NO: 4646 - RNA, 20 nt, synthetic construct
  misc_feature 1..20: note = source = /note="Description of Artificial Sequence: Synthetic oligonucleotide"
  source 1..20: mol_type = other RNA
gaatccatgaatacccatgg

SEQ ID NO: 4647 - RNA, 20 nt, synthetic construct
  misc_feature 1..20: note = source = /note="Description of Artificial Sequence: Synthetic oligonucleotide"
  source 1..20: mol_type = other RNA
aatccatgaatacccatggg

SEQ ID NO: 4648 - RNA, 20 nt, synthetic construct
  misc_feature 1..20: note = source = /note="Description of Artificial Sequence: Synthetic oligonucleotide"
  source 1..20: mol_type = other RNA
aattttgtaattctcaacca

SEQ ID NO: 4649 - RNA, 20 nt, synthetic construct
  misc_feature 1..20: note = source = /note="Description of Artificial Sequence: Synthetic oligonucleotide"
  source 1..20: mol_type = other RNA
cacgtatagtccttgaatct

SEQ ID NO: 4650 - RNA, 20 nt, synthetic construct
  misc_feature 1..20: note = source = /note="Description of Artificial Sequence: Synthetic oligonucleotide"
  source 1..20: mol_type = other RNA
tatagtccttgaatcttggt

SEQ ID NO: 4651 - RNA, 20 nt, synthetic construct
  misc_feature 1..20: note = source = /note="Description of Artificial Sequence: Synthetic oligonucleotide"
  source 1..20: mol_type = other RNA
ttgaatcttggtaggagtct

SEQ ID NO: 4652 - RNA, 20 nt, synthetic construct
  misc_feature 1..20: note = source = /note="Description of Artificial Sequence: Synthetic oligonucleotide"
  source 1..20: mol_type = other RNA
tgaatcttggtaggagtctt

SEQ ID NO: 4653 - RNA, 20 nt, synthetic construct
  misc_feature 1..20: note = source = /note="Description of Artificial Sequence: Synthetic oligonucleotide"
  source 1..20: mol_type = other RNA
gaatcttggtaggagtcttg

SEQ ID NO: 4654 - RNA, 20 nt, synthetic construct
  misc_feature 1..20: note = source = /note="Description of Artificial Sequence: Synthetic oligonucleotide"
  source 1..20: mol_type = other RNA
tcttaatatcctttctttta

SEQ ID NO: 4655 - RNA, 20 nt, synthetic construct
  misc_feature 1..20: note = source = /note="Description of Artificial Sequence: Synthetic oligonucleotide"
  source 1..20: mol_type = other RNA
cccatttcagactttattaa

SEQ ID NO: 4656 - RNA, 20 nt, synthetic construct
  misc_feature 1..20: note = source = /note="Description of Artificial Sequence: Synthetic oligonucleotide"
  source 1..20: mol_type = other RNA
ttcagactttattaaaggag

SEQ ID NO: 4657 - RNA, 20 nt, synthetic construct
  misc_feature 1..20: note = source = /note="Description of Artificial Sequence: Synthetic oligonucleotide"
  source 1..20: mol_type = other RNA
tgaagtttttgcaattagaa

SEQ ID NO: 4658 - RNA, 20 nt, synthetic construct
  misc_feature 1..20: note = source = /note="Description of Artificial Sequence: Synthetic oligonucleotide"
  source 1..20: mol_type = other RNA
caattagaatggagtttatt

SEQ ID NO: 4659 - RNA, 20 nt, synthetic construct
  misc_feature 1..20: note = source = /note="Description of Artificial Sequence: Synthetic oligonucleotide"
  source 1..20: mol_type = other RNA
tagatgtgatgtagaattct

SEQ ID NO: 4660 - RNA, 20 nt, synthetic construct
  misc_feature 1..20: note = source = /note="Description of Artificial Sequence: Synthetic oligonucleotide"
  source 1..20: mol_type = other RNA
agatgtgatgtagaattctt

SEQ ID NO: 4661 - RNA, 20 nt, synthetic construct
  misc_feature 1..20: note = source = /note="Description of Artificial Sequence: Synthetic oligonucleotide"
  source 1..20: mol_type = other RNA
gatgtgatgtagaattcttg

SEQ ID NO: 4662 - RNA, 20 nt, synthetic construct
  misc_feature 1..20: note = source = /note="Description of Artificial Sequence: Synthetic oligonucleotide"
  source 1..20: mol_type = other RNA
tacttatccccttttcagag

SEQ ID NO: 4663 - RNA, 20 nt, synthetic construct
  misc_feature 1..20: note = source = /note="Description of Artificial Sequence: Synthetic oligonucleotide"
  source 1..20: mol_type = other RNA
ctgaatagctctgtgaaccc

SEQ ID NO: 4664 - RNA, 20 nt, synthetic construct
  misc_feature 1..20: note = source = /note="Description of Artificial Sequence: Synthetic oligonucleotide"
  source 1..20: mol_type = other RNA
tatgcttgatattcctgatc

SEQ ID NO: 4665 - RNA, 20 nt, synthetic construct
  misc_feature 1..20: note = source = /note="Description of Artificial Sequence: Synthetic oligonucleotide"
  source 1..20: mol_type = other RNA
gatattcctgatctggctcc

SEQ ID NO: 4666 - RNA, 20 nt, synthetic construct
  misc_feature 1..20: note = source = /note="Description of Artificial Sequence: Synthetic oligonucleotide"
  source 1..20: mol_type = other RNA
cacagctcagatttctcata

SEQ ID NO: 4667 - RNA, 20 nt, synthetic construct
  misc_feature 1..20: note = source = /note="Description of Artificial Sequence: Synthetic oligonucleotide"
  source 1..20: mol_type = other RNA
acagctcagatttctcataa

SEQ ID NO: 4668 - RNA, 20 nt, synthetic construct
  misc_feature 1..20: note = source = /note="Description of Artificial Sequence: Synthetic oligonucleotide"
  source 1..20: mol_type = other RNA
gggaagcttcatatttgttg

SEQ ID NO: 4669 - RNA, 20 nt, synthetic construct
  misc_feature 1..20: note = source = /note="Description of Artificial Sequence: Synthetic oligonucleotide"
  source 1..20: mol_type = other RNA
ttgcagattctgaaattcct

SEQ ID NO: 4670 - RNA, 20 nt, synthetic construct
  misc_feature 1..20: note = source = /note="Description of Artificial Sequence: Synthetic oligonucleotide"
  source 1..20: mol_type = other RNA
tgcagattctgaaattccta

SEQ ID NO: 4671 - RNA, 20 nt, synthetic construct
  misc_feature 1..20: note = source = /note="Description of Artificial Sequence: Synthetic oligonucleotide"
  source 1..20: mol_type = other RNA
ttctgaaattcctagggcaa

SEQ ID NO: 4672 - RNA, 20 nt, synthetic construct
  misc_feature 1..20: note = source = /note="Description of Artificial Sequence: Synthetic oligonucleotide"
  source 1..20: mol_type = other RNA
ctaatattttacacagtatc

SEQ ID NO: 4673 - RNA, 20 nt, synthetic construct
  misc_feature 1..20: note = source = /note="Description of Artificial Sequence: Synthetic oligonucleotide"
  source 1..20: mol_type = other RNA
acagtatctggttacatagt

SEQ ID NO: 4674 - RNA, 20 nt, synthetic construct
  misc_feature 1..20: note = source = /note="Description of Artificial Sequence: Synthetic oligonucleotide"
  source 1..20: mol_type = other RNA
atcatacaatttaaaagaag

SEQ ID NO: 4675 - RNA, 20 nt, synthetic construct
  misc_feature 1..20: note = source = /note="Description of Artificial Sequence: Synthetic oligonucleotide"
  source 1..20: mol_type = other RNA
ttatttccctctccccctac

SEQ ID NO: 4676 - RNA, 20 nt, synthetic construct
  misc_feature 1..20: note = source = /note="Description of Artificial Sequence: Synthetic oligonucleotide"
  source 1..20: mol_type = other RNA
tacagcacttgcccactaag

SEQ ID NO: 4677 - RNA, 20 nt, synthetic construct
  misc_feature 1..20: note = source = /note="Description of Artificial Sequence: Synthetic oligonucleotide"
  source 1..20: mol_type = other RNA
agcacttgcccactaagtgg

SEQ ID NO: 4678 - RNA, 20 nt, synthetic construct
  misc_feature 1..20: note = source = /note="Description of Artificial Sequence: Synthetic oligonucleotide"
  source 1..20: mol_type = other RNA
gcacttgcccactaagtgga

SEQ ID NO: 4679 - RNA, 20 nt, synthetic construct
  misc_feature 1..20: note = source = /note="Description of Artificial Sequence: Synthetic oligonucleotide"
  source 1..20: mol_type = other RNA
gcccactaagtggagggaag

SEQ ID NO: 4680 - RNA, 20 nt, synthetic construct
  misc_feature 1..20: note = source = /note="Description of Artificial Sequence: Synthetic oligonucleotide"
  source 1..20: mol_type = other RNA
ctaagtggagggaagaggtg

SEQ ID NO: 4681 - RNA, 20 nt, synthetic construct
  misc_feature 1..20: note = source = /note="Description of Artificial Sequence: Synthetic oligonucleotide"
  source 1..20: mol_type = other RNA
taagtggagggaagaggtgt

SEQ ID NO: 4682 - RNA, 20 nt, synthetic construct
  misc_feature 1..20: note = source = /note="Description of Artificial Sequence: Synthetic oligonucleotide"
  source 1..20: mol_type = other RNA
aggtgtgggagtcgagtagt

SEQ ID NO: 4683 - RNA, 20 nt, synthetic construct
  misc_feature 1..20: note = source = /note="Description of Artificial Sequence: Synthetic oligonucleotide"
  source 1..20: mol_type = other RNA
tttgcaaagttacattatat

SEQ ID NO: 4684 - RNA, 20 nt, synthetic construct
  misc_feature 1..20: note = source = /note="Description of Artificial Sequence: Synthetic oligonucleotide"
  source 1..20: mol_type = other RNA
ttaattataagcaacacttg

SEQ ID NO: 4685 - RNA, 20 nt, synthetic construct
  misc_feature 1..20: note = source = /note="Description of Artificial Sequence: Synthetic oligonucleotide"
  source 1..20: mol_type = other RNA
tgttgcagttgagatttgtg

SEQ ID NO: 4686 - RNA, 20 nt, synthetic construct
  misc_feature 1..20: note = source = /note="Description of Artificial Sequence: Synthetic oligonucleotide"
  source 1..20: mol_type = other RNA
tttagctatttagagacttt

SEQ ID NO: 4687 - RNA, 20 nt, synthetic construct
  misc_feature 1..20: note = source = /note="Description of Artificial Sequence: Synthetic oligonucleotide"
  source 1..20: mol_type = other RNA
ttagctatttagagacttta

SEQ ID NO: 4688 - RNA, 20 nt, synthetic construct
  misc_feature 1..20: note = source = /note="Description of Artificial Sequence: Synthetic oligonucleotide"
  source 1..20: mol_type = other RNA
aatgatatttgatgtctatt

SEQ ID NO: 4689 - RNA, 20 nt, synthetic construct
  misc_feature 1..20: note = source = /note="Description of Artificial Sequence: Synthetic oligonucleotide"
  source 1..20: mol_type = other RNA
ttttcttatccagcagtttt

SEQ ID NO: 4690 - RNA, 20 nt, synthetic construct
  misc_feature 1..20: note = source = /note="Description of Artificial Sequence: Synthetic oligonucleotide"
  source 1..20: mol_type = other RNA
actgtcagagaagcagaaag

SEQ ID NO: 4691 - RNA, 20 nt, synthetic construct
  misc_feature 1..20: note = source = /note="Description of Artificial Sequence: Synthetic oligonucleotide"
  source 1..20: mol_type = other RNA
gagaagcagaaagtggtcag

SEQ ID NO: 4692 - RNA, 20 nt, synthetic construct
  misc_feature 1..20: note = source = /note="Description of Artificial Sequence: Synthetic oligonucleotide"
  source 1..20: mol_type = other RNA
gtcagtggactttagaatgt

SEQ ID NO: 4693 - RNA, 20 nt, synthetic construct
  misc_feature 1..20: note = source = /note="Description of Artificial Sequence: Synthetic oligonucleotide"
  source 1..20: mol_type = other RNA
tttagaatgtaggctcttgt

SEQ ID NO: 4694 - RNA, 20 nt, synthetic construct
  misc_feature 1..20: note = source = /note="Description of Artificial Sequence: Synthetic oligonucleotide"
  source 1..20: mol_type = other RNA
agaatgtaggctcttgtagg

SEQ ID NO: 4695 - RNA, 20 nt, synthetic construct
  misc_feature 1..20: note = source = /note="Description of Artificial Sequence: Synthetic oligonucleotide"
  source 1..20: mol_type = other RNA
tatgtttgagagtgctgtcc

SEQ ID NO: 4696 - RNA, 20 nt, synthetic construct
  misc_feature 1..20: note = source = /note="Description of Artificial Sequence: Synthetic oligonucleotide"
  source 1..20: mol_type = other RNA
tgtccaggtgctttgtgatg

SEQ ID NO: 4697 - RNA, 20 nt, synthetic construct
  misc_feature 1..20: note = source = /note="Description of Artificial Sequence: Synthetic oligonucleotide"
  source 1..20: mol_type = other RNA
ctttgtgatgtggctgagaa

SEQ ID NO: 4698 - RNA, 20 nt, synthetic construct
  misc_feature 1..20: note = source = /note="Description of Artificial Sequence: Synthetic oligonucleotide"
  source 1..20: mol_type = other RNA
atgtggctgagaatggatgc

SEQ ID NO: 4699 - RNA, 20 nt, synthetic construct
  misc_feature 1..20: note = source = /note="Description of Artificial Sequence: Synthetic oligonucleotide"
  source 1..20: mol_type = other RNA
gagaatggatgcaggcttgc

SEQ ID NO: 4700 - RNA, 20 nt, synthetic construct
  misc_feature 1..20: note = source = /note="Description of Artificial Sequence: Synthetic oligonucleotide"
  source 1..20: mol_type = other RNA
agaatggatgcaggcttgca

SEQ ID NO: 4701 - RNA, 20 nt, synthetic construct
  misc_feature 1..20: note = source = /note="Description of Artificial Sequence: Synthetic oligonucleotide"
  source 1..20: mol_type = other RNA
agatctctagagagcatttt

SEQ ID NO: 4702 - RNA, 20 nt, synthetic construct
  misc_feature 1..20: note = source = /note="Description of Artificial Sequence: Synthetic oligonucleotide"
  source 1..20: mol_type = other RNA
aggaaagacttctaagcttt

SEQ ID NO: 4703 - RNA, 20 nt, synthetic construct
  misc_feature 1..20: note = source = /note="Description of Artificial Sequence: Synthetic oligonucleotide"
  source 1..20: mol_type = other RNA
cttaatatccatagctatag

SEQ ID NO: 4704 - RNA, 20 nt, synthetic construct
  misc_feature 1..20: note = source = /note="Description of Artificial Sequence: Synthetic oligonucleotide"
  source 1..20: mol_type = other RNA
aaatgtagaattaaatattt

SEQ ID NO: 4705 - RNA, 20 nt, synthetic construct
  misc_feature 1..20: note = source = /note="Description of Artificial Sequence: Synthetic oligonucleotide"
  source 1..20: mol_type = other RNA
taatgaaatataaaaccaga

SEQ ID NO: 4706 - RNA, 20 nt, synthetic construct
  misc_feature 1..20: note = source = /note="Description of Artificial Sequence: Synthetic oligonucleotide"
  source 1..20: mol_type = other RNA
aaaaccagatggtctctgaa

SEQ ID NO: 4707 - RNA, 20 nt, synthetic construct
  misc_feature 1..20: note = source = /note="Description of Artificial Sequence: Synthetic oligonucleotide"
  source 1..20: mol_type = other RNA
ctttactcactttcagagta

SEQ ID NO: 4708 - RNA, 20 nt, synthetic construct
  misc_feature 1..20: note = source = /note="Description of Artificial Sequence: Synthetic oligonucleotide"
  source 1..20: mol_type = other RNA
ctcactttcagagtaaggca

SEQ ID NO: 4709 - RNA, 20 nt, synthetic construct
  misc_feature 1..20: note = source = /note="Description of Artificial Sequence: Synthetic oligonucleotide"
  source 1..20: mol_type = other RNA
agtatttaataaatgttttt

SEQ ID NO: 4710 - RNA, 20 nt, synthetic construct
  misc_feature 1..20: note = source = /note="Description of Artificial Sequence: Synthetic oligonucleotide"
  source 1..20: mol_type = other RNA
gtatttaataaatgtttttt

SEQ ID NO: 4711 - RNA, 20 nt, synthetic construct
  misc_feature 1..20: note = source = /note="Description of Artificial Sequence: Synthetic oligonucleotide"
  source 1..20: mol_type = other RNA
taataaatgttttttgggcc

SEQ ID NO: 4712 - RNA, 20 nt, synthetic construct
  misc_feature 1..20: note = source = /note="Description of Artificial Sequence: Synthetic oligonucleotide"
  source 1..20: mol_type = other RNA
aatgttttttgggccaggtg

SEQ ID NO: 4713 - RNA, 20 nt, synthetic construct
  misc_feature 1..20: note = source = /note="Description of Artificial Sequence: Synthetic oligonucleotide"
  source 1..20: mol_type = other RNA
ctcctgtaatcccagcaatt

SEQ ID NO: 4714 - RNA, 20 nt, synthetic construct
  misc_feature 1..20: note = source = /note="Description of Artificial Sequence: Synthetic oligonucleotide"
  source 1..20: mol_type = other RNA
tcctgtaatcccagcaattt

SEQ ID NO: 4715 - RNA, 20 nt, synthetic construct
  misc_feature 1..20: note = source = /note="Description of Artificial Sequence: Synthetic oligonucleotide"
  source 1..20: mol_type = other RNA
tgtaatcccagcaatttggg

SEQ ID NO: 4716 - RNA, 20 nt, synthetic construct
  misc_feature 1..20: note = source = /note="Description of Artificial Sequence: Synthetic oligonucleotide"
  source 1..20: mol_type = other RNA
cccagcaatttgggaggccg

SEQ ID NO: 4717 - RNA, 20 nt, synthetic construct
  misc_feature 1..20: note = source = /note="Description of Artificial Sequence: Synthetic oligonucleotide"
  source 1..20: mol_type = other RNA
agcaatttgggaggccgagg

SEQ ID NO: 4718 - RNA, 20 nt, synthetic construct
  misc_feature 1..20: note = source = /note="Description of Artificial Sequence: Synthetic oligonucleotide"
  source 1..20: mol_type = other RNA
gcaatttgggaggccgaggc

SEQ ID NO: 4719 - RNA, 20 nt, synthetic construct
  misc_feature 1..20: note = source = /note="Description of Artificial Sequence: Synthetic oligonucleotide"
  source 1..20: mol_type = other RNA
atttgggaggccgaggcggg

SEQ ID NO: 4720 - RNA, 20 nt, synthetic construct
  misc_feature 1..20: note = source = /note="Description of Artificial Sequence: Synthetic oligonucleotide"
  source 1..20: mol_type = other RNA
cgaggcgggtggatcacctg

SEQ ID NO: 4721 - RNA, 20 nt, synthetic construct
  misc_feature 1..20: note = source = /note="Description of Artificial Sequence: Synthetic oligonucleotide"
  source 1..20: mol_type = other RNA
tgagaccagcctgaccagta

SEQ ID NO: 4722 - RNA, 20 nt, synthetic construct
  misc_feature 1..20: note = source = /note="Description of Artificial Sequence: Synthetic oligonucleotide"
  source 1..20: mol_type = other RNA
actaaaaatgcaaaattagc

SEQ ID NO: 4723 - RNA, 20 nt, synthetic construct
  misc_feature 1..20: note = source = /note="Description of Artificial Sequence: Synthetic oligonucleotide"
  source 1..20: mol_type = other RNA
ctaaaaatgcaaaattagct

SEQ ID NO: 4724 - RNA, 20 nt, synthetic construct
  misc_feature 1..20: note = source = /note="Description of Artificial Sequence: Synthetic oligonucleotide"
  source 1..20: mol_type = other RNA
taaaaatgcaaaattagctg

SEQ ID NO: 4725 - RNA, 20 nt, synthetic construct
  misc_feature 1..20: note = source = /note="Description of Artificial Sequence: Synthetic oligonucleotide"
  source 1..20: mol_type = other RNA
aaaaatgcaaaattagctgg

SEQ ID NO: 4726 - RNA, 20 nt, synthetic construct
  misc_feature 1..20: note = source = /note="Description of Artificial Sequence: Synthetic oligonucleotide"
  source 1..20: mol_type = other RNA
aatgcaaaattagctggggg

SEQ ID NO: 4727 - RNA, 20 nt, synthetic construct
  misc_feature 1..20: note = source = /note="Description of Artificial Sequence: Synthetic oligonucleotide"
  source 1..20: mol_type = other RNA
gcaaaattagctgggggtgg

SEQ ID NO: 4728 - RNA, 20 nt, synthetic construct
  misc_feature 1..20: note = source = /note="Description of Artificial Sequence: Synthetic oligonucleotide"
  source 1..20: mol_type = other RNA
tgcctataataccagctact

SEQ ID NO: 4729 - RNA, 20 nt, synthetic construct
  misc_feature 1..20: note = source = /note="Description of Artificial Sequence: Synthetic oligonucleotide"
  source 1..20: mol_type = other RNA
gcctataataccagctactc

SEQ ID NO: 4730 - RNA, 20 nt, synthetic construct
  misc_feature 1..20: note = source = /note="Description of Artificial Sequence: Synthetic oligonucleotide"
  source 1..20: mol_type = other RNA
tataataccagctactcggg

SEQ ID NO: 4731 - RNA, 20 nt, synthetic construct
  misc_feature 1..20: note = source = /note="Description of Artificial Sequence: Synthetic oligonucleotide"
  source 1..20: mol_type = other RNA
accagctactcgggaggctg

SEQ ID NO: 4732 - RNA, 20 nt, synthetic construct
  misc_feature 1..20: note = source = /note="Description of Artificial Sequence: Synthetic oligonucleotide"
  source 1..20: mol_type = other RNA
gctactcgggaggctgaggc

SEQ ID NO: 4733 - RNA, 20 nt, synthetic construct
  misc_feature 1..20: note = source = /note="Description of Artificial Sequence: Synthetic oligonucleotide"
  source 1..20: mol_type = other RNA
ctactcgggaggctgaggca

SEQ ID NO: 4734 - RNA, 20 nt, synthetic construct
  misc_feature 1..20: note = source = /note="Description of Artificial Sequence: Synthetic oligonucleotide"
  source 1..20: mol_type = other RNA
tactcgggaggctgaggcag

SEQ ID NO: 4735 - RNA, 20 nt, synthetic construct
  misc_feature 1..20: note = source = /note="Description of Artificial Sequence: Synthetic oligonucleotide"
  source 1..20: mol_type = other RNA
caggggaatcgcttgaactc

SEQ ID NO: 4736 - RNA, 20 nt, synthetic construct
  misc_feature 1..20: note = source = /note="Description of Artificial Sequence: Synthetic oligonucleotide"
  source 1..20: mol_type = other RNA
gggaatcgcttgaactcagg

SEQ ID NO: 4737 - RNA, 20 nt, synthetic construct
  misc_feature 1..20: note = source = /note="Description of Artificial Sequence: Synthetic oligonucleotide"
  source 1..20: mol_type = other RNA
aatcgcttgaactcaggagg

SEQ ID NO: 4738 - RNA, 20 nt, synthetic construct
  misc_feature 1..20: note = source = /note="Description of Artificial Sequence: Synthetic oligonucleotide"
  source 1..20: mol_type = other RNA
cgcttgaactcaggaggtgg

SEQ ID NO: 4739 - RNA, 20 nt, synthetic construct
  misc_feature 1..20: note = source = /note="Description of Artificial Sequence: Synthetic oligonucleotide"
  source 1..20: mol_type = other RNA
aatgctttttgatttaacga

SEQ ID NO: 4740 - RNA, 20 nt, synthetic construct
  misc_feature 1..20: note = source = /note="Description of Artificial Sequence: Synthetic oligonucleotide"
  source 1..20: mol_type = other RNA
ggtgtcattgtcctatgaaa

SEQ ID NO: 4741 - RNA, 20 nt, synthetic construct
  misc_feature 1..20: note = source = /note="Description of Artificial Sequence: Synthetic oligonucleotide"
  source 1..20: mol_type = other RNA
cttagcttttgataatgata

SEQ ID NO: 4742 - RNA, 20 nt, synthetic construct
  misc_feature 1..20: note = source = /note="Description of Artificial Sequence: Synthetic oligonucleotide"
  source 1..20: mol_type = other RNA
aaatatttgagaccagttaa

SEQ ID NO: 4743 - RNA, 20 nt, synthetic construct
  misc_feature 1..20: note = source = /note="Description of Artificial Sequence: Synthetic oligonucleotide"
  source 1..20: mol_type = other RNA
gaccagttaaaggagacaga

SEQ ID NO: 4744 - RNA, 20 nt, synthetic construct
  misc_feature 1..20: note = source = /note="Description of Artificial Sequence: Synthetic oligonucleotide"
  source 1..20: mol_type = other RNA
aaggagacagaaggaagtta

SEQ ID NO: 4745 - RNA, 20 nt, synthetic construct
  misc_feature 1..20: note = source = /note="Description of Artificial Sequence: Synthetic oligonucleotide"
  source 1..20: mol_type = other RNA
gaagcagtagccagaaaata

SEQ ID NO: 4746 - RNA, 20 nt, synthetic construct
  misc_feature 1..20: note = source = /note="Description of Artificial Sequence: Synthetic oligonucleotide"
  source 1..20: mol_type = other RNA
aagcagtagccagaaaataa

SEQ ID NO: 4747 - RNA, 20 nt, synthetic construct
  misc_feature 1..20: note = source = /note="Description of Artificial Sequence: Synthetic oligonucleotide"
  source 1..20: mol_type = other RNA
aaattgctattattatcatc

SEQ ID NO: 4748 - RNA, 20 nt, synthetic construct
  misc_feature 1..20: note = source = /note="Description of Artificial Sequence: Synthetic oligonucleotide"
  source 1..20: mol_type = other RNA
ctggaaaaaatatgccttgt

SEQ ID NO: 4749 - RNA, 20 nt, synthetic construct
  misc_feature 1..20: note = source = /note="Description of Artificial Sequence: Synthetic oligonucleotide"
  source 1..20: mol_type = other RNA
attccctttccataccatgc

SEQ ID NO: 4750 - RNA, 20 nt, synthetic construct
  misc_feature 1..20: note = source = /note="Description of Artificial Sequence: Synthetic oligonucleotide"
  source 1..20: mol_type = other RNA
ttctttactgcattcctaag

SEQ ID NO: 4751 - RNA, 20 nt, synthetic construct
  misc_feature 1..20: note = source = /note="Description of Artificial Sequence: Synthetic oligonucleotide"
  source 1..20: mol_type = other RNA
ggactagtctagcacctaat

SEQ ID NO: 4752 - RNA, 20 nt, synthetic construct
  misc_feature 1..20: note = source = /note="Description of Artificial Sequence: Synthetic oligonucleotide"
  source 1..20: mol_type = other RNA
agcacctaattggatacttg

SEQ ID NO: 4753 - RNA, 20 nt, synthetic construct
  misc_feature 1..20: note = source = /note="Description of Artificial Sequence: Synthetic oligonucleotide"
  source 1..20: mol_type = other RNA
tggatacttgtggtaatatt

SEQ ID NO: 4754 - RNA, 20 nt, synthetic construct
  misc_feature 1..20: note = source = /note="Description of Artificial Sequence: Synthetic oligonucleotide"
  source 1..20: mol_type = other RNA
ggatacttgtggtaatattt

SEQ ID NO: 4755 - RNA, 20 nt, synthetic construct
  misc_feature 1..20: note = source = /note="Description of Artificial Sequence: Synthetic oligonucleotide"
  source 1..20: mol_type = other RNA
tatttgggaactcactgatc

SEQ ID NO: 4756 - RNA, 20 nt, synthetic construct
  misc_feature 1..20: note = source = /note="Description of Artificial Sequence: Synthetic oligonucleotide"
  source 1..20: mol_type = other RNA
actgatctggtacatcagtg

SEQ ID NO: 4757 - RNA, 20 nt, synthetic construct
  misc_feature 1..20: note = source = /note="Description of Artificial Sequence: Synthetic oligonucleotide"
  source 1..20: mol_type = other RNA
ctgatctggtacatcagtgt

SEQ ID NO: 4758 - RNA, 20 nt, synthetic construct
  misc_feature 1..20: note = source = /note="Description of Artificial Sequence: Synthetic oligonucleotide"
  source 1..20: mol_type = other RNA
tgttgcagttgagagttgtg

SEQ ID NO: 4759 - RNA, 20 nt, synthetic construct
  misc_feature 1..20: note = source = /note="Description of Artificial Sequence: Synthetic oligonucleotide"
  source 1..20: mol_type = other RNA
gttgtgaggttttagctatt

SEQ ID NO: 4760 - RNA, 20 nt, synthetic construct
  misc_feature 1..20: note = source = /note="Description of Artificial Sequence: Synthetic oligonucleotide"
  source 1..20: mol_type = other RNA
tttagctatttggaaacttt

SEQ ID NO: 4761 - RNA, 20 nt, synthetic construct
  misc_feature 1..20: note = source = /note="Description of Artificial Sequence: Synthetic oligonucleotide"
  source 1..20: mol_type = other RNA
ttagctatttggaaacttta

SEQ ID NO: 4762 - RNA, 20 nt, synthetic construct
  misc_feature 1..20: note = source = /note="Description of Artificial Sequence: Synthetic oligonucleotide"
  source 1..20: mol_type = other RNA
gagcaagaatctgtcactct

SEQ ID NO: 4763 - RNA, 20 nt, synthetic construct
  misc_feature 1..20: note = source = /note="Description of Artificial Sequence: Synthetic oligonucleotide"
  source 1..20: mol_type = other RNA
tactctttattaaagaatgt

SEQ ID NO: 4764 - RNA, 20 nt, synthetic construct
  misc_feature 1..20: note = source = /note="Description of Artificial Sequence: Synthetic oligonucleotide"
  source 1..20: mol_type = other RNA
tggattcatttataacttac

SEQ ID NO: 4765 - RNA, 20 nt, synthetic construct
  misc_feature 1..20: note = source = /note="Description of Artificial Sequence: Synthetic oligonucleotide"
  source 1..20: mol_type = other RNA
gtcccttaaatattaaagtt

SEQ ID NO: 4766 - RNA, 20 nt, synthetic construct
  misc_feature 1..20: note = source = /note="Description of Artificial Sequence: Synthetic oligonucleotide"
  source 1..20: mol_type = other RNA
aaatattaaagtttggtgtt

SEQ ID NO: 4767 - RNA, 20 nt, synthetic construct
  misc_feature 1..20: note = source = /note="Description of Artificial Sequence: Synthetic oligonucleotide"
  source 1..20: mol_type = other RNA
aaacatgattacatccttat

SEQ ID NO: 4768 - RNA, 20 nt, synthetic construct
  misc_feature 1..20: note = source = /note="Description of Artificial Sequence: Synthetic oligonucleotide"
  source 1..20: mol_type = other RNA
aacatgattacatccttata

SEQ ID NO: 4769 - RNA, 20 nt, synthetic construct
  misc_feature 1..20: note = source = /note="Description of Artificial Sequence: Synthetic oligonucleotide"
  source 1..20: mol_type = other RNA
agggctctcttctaattgcc

SEQ ID NO: 4770 - RNA, 20 nt, synthetic construct
  misc_feature 1..20: note = source = /note="Description of Artificial Sequence: Synthetic oligonucleotide"
  source 1..20: mol_type = other RNA
acattgaagttagtccgcaa

SEQ ID NO: 4771 - RNA, 20 nt, synthetic construct
  misc_feature 1..20: note = source = /note="Description of Artificial Sequence: Synthetic oligonucleotide"
  source 1..20: mol_type = other RNA
aaggtttttgtctttttttc

SEQ ID NO: 4772 - RNA, 20 nt, synthetic construct
  misc_feature 1..20: note = source = /note="Description of Artificial Sequence: Synthetic oligonucleotide"
  source 1..20: mol_type = other RNA
gtgattttctaaataaatgt

SEQ ID NO: 4773 - RNA, 20 nt, synthetic construct
  misc_feature 1..20: note = source = /note="Description of Artificial Sequence: Synthetic oligonucleotide"
  source 1..20: mol_type = other RNA
ttcttcaagtccctccttta

SEQ ID NO: 4774 - RNA, 20 nt, synthetic construct
  misc_feature 1..20: note = source = /note="Description of Artificial Sequence: Synthetic oligonucleotide"
  source 1..20: mol_type = other RNA
ccctcctttaaggaaattta

SEQ ID NO: 4775 - RNA, 20 nt, synthetic construct
  misc_feature 1..20: note = source = /note="Description of Artificial Sequence: Synthetic oligonucleotide"
  source 1..20: mol_type = other RNA
tctttttccataccatcaag

SEQ ID NO: 4776 - RNA, 20 nt, synthetic construct
  misc_feature 1..20: note = source = /note="Description of Artificial Sequence: Synthetic oligonucleotide"
  source 1..20: mol_type = other RNA
taacttttttccttaagttc

SEQ ID NO: 4777 - RNA, 20 nt, synthetic construct
  misc_feature 1..20: note = source = /note="Description of Artificial Sequence: Synthetic oligonucleotide"
  source 1..20: mol_type = other RNA
aagttcaggagtacacgtgc

SEQ ID NO: 4778 - RNA, 20 nt, synthetic construct
  misc_feature 1..20: note = source = /note="Description of Artificial Sequence: Synthetic oligonucleotide"
  source 1..20: mol_type = other RNA
cacgtgcaggtttgttgcat

SEQ ID NO: 4779 - RNA, 20 nt, synthetic construct
  misc_feature 1..20: note = source = /note="Description of Artificial Sequence: Synthetic oligonucleotide"
  source 1..20: mol_type = other RNA
gtttgttgcataggcaacct

SEQ ID NO: 4780 - RNA, 20 nt, synthetic construct
  misc_feature 1..20: note = source = /note="Description of Artificial Sequence: Synthetic oligonucleotide"
  source 1..20: mol_type = other RNA
tttgttgcataggcaacctt

SEQ ID NO: 4781 - RNA, 20 nt, synthetic construct
  misc_feature 1..20: note = source = /note="Description of Artificial Sequence: Synthetic oligonucleotide"
  source 1..20: mol_type = other RNA
gcataggcaaccttgggtca

SEQ ID NO: 4782 - RNA, 20 nt, synthetic construct
  misc_feature 1..20: note = source = /note="Description of Artificial Sequence: Synthetic oligonucleotide"
  source 1..20: mol_type = other RNA
cataggcaaccttgggtcat

SEQ ID NO: 4783 - RNA, 20 nt, synthetic construct
  misc_feature 1..20: note = source = /note="Description of Artificial Sequence: Synthetic oligonucleotide"
  source 1..20: mol_type = other RNA
gtcatgggagtttgttgtac

SEQ ID NO: 4784 - RNA, 20 nt, synthetic construct
  misc_feature 1..20: note = source = /note="Description of Artificial Sequence: Synthetic oligonucleotide"
  source 1..20: mol_type = other RNA
tacaggttatttcatcaccc

SEQ ID NO: 4785 - RNA, 20 nt, synthetic construct
  misc_feature 1..20: note = source = /note="Description of Artificial Sequence: Synthetic oligonucleotide"
  source 1..20: mol_type = other RNA
cccaccctccaccctctgat

SEQ ID NO: 4786 - RNA, 20 nt, synthetic construct
  misc_feature 1..20: note = source = /note="Description of Artificial Sequence: Synthetic oligonucleotide"
  source 1..20: mol_type = other RNA
ctccaccctctgataggccc

SEQ ID NO: 4787 - RNA, 20 nt, synthetic construct
  misc_feature 1..20: note = source = /note="Description of Artificial Sequence: Synthetic oligonucleotide"
  source 1..20: mol_type = other RNA
aagtgagaacatgcagtatt

SEQ ID NO: 4788 - RNA, 20 nt, synthetic construct
  misc_feature 1..20: note = source = /note="Description of Artificial Sequence: Synthetic oligonucleotide"
  source 1..20: mol_type = other RNA
gttcctatgttagtttgcta

SEQ ID NO: 4789 - RNA, 20 nt, synthetic construct
  misc_feature 1..20: note = source = /note="Description of Artificial Sequence: Synthetic oligonucleotide"
  source 1..20: mol_type = other RNA
tgttagtttgctatggataa

SEQ ID NO: 4790 - RNA, 20 nt, synthetic construct
  misc_feature 1..20: note = source = /note="Description of Artificial Sequence: Synthetic oligonucleotide"
  source 1..20: mol_type = other RNA
catgatcttattctcttata

SEQ ID NO: 4791 - RNA, 20 nt, synthetic construct
  misc_feature 1..20: note = source = /note="Description of Artificial Sequence: Synthetic oligonucleotide"
  source 1..20: mol_type = other RNA
tatggctgcatgttattcca

SEQ ID NO: 4792 - RNA, 20 nt, synthetic construct
  misc_feature 1..20: note = source = /note="Description of Artificial Sequence: Synthetic oligonucleotide"
  source 1..20: mol_type = other RNA
ttttttatccagtctattat

SEQ ID NO: 4793 - RNA, 20 nt, synthetic construct
  misc_feature 1..20: note = source = /note="Description of Artificial Sequence: Synthetic oligonucleotide"
  source 1..20: mol_type = other RNA
tttatccagtctattattgg

SEQ ID NO: 4794 - RNA, 20 nt, synthetic construct
  misc_feature 1..20: note = source = /note="Description of Artificial Sequence: Synthetic oligonucleotide"
  source 1..20: mol_type = other RNA
ttatccagtctattattggt

SEQ ID NO: 4795 - RNA, 20 nt, synthetic construct
  misc_feature 1..20: note = source = /note="Description of Artificial Sequence: Synthetic oligonucleotide"
  source 1..20: mol_type = other RNA
tctattattggtgggcattt

SEQ ID NO: 4796 - RNA, 20 nt, synthetic construct
  misc_feature 1..20: note = source = /note="Description of Artificial Sequence: Synthetic oligonucleotide"
  source 1..20: mol_type = other RNA
atgtctttgctattgtgaat

SEQ ID NO: 4797 - RNA, 20 nt, synthetic construct
  misc_feature 1..20: note = source = /note="Description of Artificial Sequence: Synthetic oligonucleotide"
  source 1..20: mol_type = other RNA
agaataatttttttttcctt

SEQ ID NO: 4798 - RNA, 20 nt, synthetic construct
  misc_feature 1..20: note = source = /note="Description of Artificial Sequence: Synthetic oligonucleotide"
  source 1..20: mol_type = other RNA
ctttggtatatacccagtag

SEQ ID NO: 4799 - RNA, 20 nt, synthetic construct
  misc_feature 1..20: note = source = /note="Description of Artificial Sequence: Synthetic oligonucleotide"
  source 1..20: mol_type = other RNA
tttggtatatacccagtagt

SEQ ID NO: 4800 - RNA, 20 nt, synthetic construct
  misc_feature 1..20: note = source = /note="Description of Artificial Sequence: Synthetic oligonucleotide"
  source 1..20: mol_type = other RNA
ttggtatatacccagtagtg

SEQ ID NO: 4801 - RNA, 20 nt, synthetic construct
  misc_feature 1..20: note = source = /note="Description of Artificial Sequence: Synthetic oligonucleotide"
  source 1..20: mol_type = other RNA
atacccagtagtggggttgc

SEQ ID NO: 4802 - RNA, 20 nt, synthetic construct
  misc_feature 1..20: note = source = /note="Description of Artificial Sequence: Synthetic oligonucleotide"
  source 1..20: mol_type = other RNA
tacccagtagtggggttgct

SEQ ID NO: 4803 - RNA, 20 nt, synthetic construct
  misc_feature 1..20: note = source = /note="Description of Artificial Sequence: Synthetic oligonucleotide"
  source 1..20: mol_type = other RNA
tgaatagtatttctgtcttg

SEQ ID NO: 4804 - RNA, 20 nt, synthetic construct
  misc_feature 1..20: note = source = /note="Description of Artificial Sequence: Synthetic oligonucleotide"
  source 1..20: mol_type = other RNA
tttctgtcttgaggtctttg

SEQ ID NO: 4805 - RNA, 20 nt, synthetic construct
  misc_feature 1..20: note = source = /note="Description of Artificial Sequence: Synthetic oligonucleotide"
  source 1..20: mol_type = other RNA
cgctacactgtcttccacaa

SEQ ID NO: 4806 - RNA, 20 nt, synthetic construct
  misc_feature 1..20: note = source = /note="Description of Artificial Sequence: Synthetic oligonucleotide"
  source 1..20: mol_type = other RNA
ttaataatagccgtcctgac

SEQ ID NO: 4807 - RNA, 20 nt, synthetic construct
  misc_feature 1..20: note = source = /note="Description of Artificial Sequence: Synthetic oligonucleotide"
  source 1..20: mol_type = other RNA
ccgtcctgactggtgtgaga

SEQ ID NO: 4808 - RNA, 20 nt, synthetic construct
  misc_feature 1..20: note = source = /note="Description of Artificial Sequence: Synthetic oligonucleotide"
  source 1..20: mol_type = other RNA
tgtgagatggtatctcattg

SEQ ID NO: 4809 - RNA, 20 nt, synthetic construct
  misc_feature 1..20: note = source = /note="Description of Artificial Sequence: Synthetic oligonucleotide"
  source 1..20: mol_type = other RNA
gctttatttcatatgtttgt

SEQ ID NO: 4810 - RNA, 20 nt, synthetic construct
  misc_feature 1..20: note = source = /note="Description of Artificial Sequence: Synthetic oligonucleotide"
  source 1..20: mol_type = other RNA
tcctttgcccactttttcaa

SEQ ID NO: 4811 - RNA, 20 nt, synthetic construct
  misc_feature 1..20: note = source = /note="Description of Artificial Sequence: Synthetic oligonucleotide"
  source 1..20: mol_type = other RNA
cctttgcccactttttcaat

SEQ ID NO: 4812 - RNA, 20 nt, synthetic construct
  misc_feature 1..20: note = source = /note="Description of Artificial Sequence: Synthetic oligonucleotide"
  source 1..20: mol_type = other RNA
ctttgcccactttttcaatg

SEQ ID NO: 4813 - RNA, 20 nt, synthetic construct
  misc_feature 1..20: note = source = /note="Description of Artificial Sequence: Synthetic oligonucleotide"
  source 1..20: mol_type = other RNA
tttaagatccttatagatgc

SEQ ID NO: 4814 - RNA, 20 nt, synthetic construct
  misc_feature 1..20: note = source = /note="Description of Artificial Sequence: Synthetic oligonucleotide"
  source 1..20: mol_type = other RNA
aaatttttctcccattctgt

SEQ ID NO: 4815 - RNA, 20 nt, synthetic construct
  misc_feature 1..20: note = source = /note="Description of Artificial Sequence: Synthetic oligonucleotide"
  source 1..20: mol_type = other RNA
tgtgaatttttgctatgaac

SEQ ID NO: 4816 - RNA, 20 nt, synthetic construct
  misc_feature 1..20: note = source = /note="Description of Artificial Sequence: Synthetic oligonucleotide"
  source 1..20: mol_type = other RNA
tatgtttaattttaactccc

SEQ ID NO: 4817 - RNA, 20 nt, synthetic construct
  misc_feature 1..20: note = source = /note="Description of Artificial Sequence: Synthetic oligonucleotide"
  source 1..20: mol_type = other RNA
tgtttttgtttttgtttttt

SEQ ID NO: 4818 - RNA, 20 nt, synthetic construct
  misc_feature 1..20: note = source = /note="Description of Artificial Sequence: Synthetic oligonucleotide"
  source 1..20: mol_type = other RNA
tgtttttgtttttttggaga

SEQ ID NO: 4819 - RNA, 20 nt, synthetic construct
  misc_feature 1..20: note = source = /note="Description of Artificial Sequence: Synthetic oligonucleotide"
  source 1..20: mol_type = other RNA
gtctcacgctgtcaccagtc

SEQ ID NO: 4820 - RNA, 20 nt, synthetic construct
  misc_feature 1..20: note = source = /note="Description of Artificial Sequence: Synthetic oligonucleotide"
  source 1..20: mol_type = other RNA
gctgtcaccagtctggagtg

SEQ ID NO: 4821 - RNA, 20 nt, synthetic construct
  misc_feature 1..20: note = source = /note="Description of Artificial Sequence: Synthetic oligonucleotide"
  source 1..20: mol_type = other RNA
ggagtgtggtgatacaatct

SEQ ID NO: 4822 - RNA, 20 nt, synthetic construct
  misc_feature 1..20: note = source = /note="Description of Artificial Sequence: Synthetic oligonucleotide"
  source 1..20: mol_type = other RNA
tcattgcaacctccacattc

SEQ ID NO: 4823 - RNA, 20 nt, synthetic construct
  misc_feature 1..20: note = source = /note="Description of Artificial Sequence: Synthetic oligonucleotide"
  source 1..20: mol_type = other RNA
cattgcaacctccacattcc

SEQ ID NO: 4824 - RNA, 20 nt, synthetic construct
  misc_feature 1..20: note = source = /note="Description of Artificial Sequence: Synthetic oligonucleotide"
  source 1..20: mol_type = other RNA
gcctcagcctcctgagtagc

SEQ ID NO: 4825 - RNA, 20 nt, synthetic construct
  misc_feature 1..20: note = source = /note="Description of Artificial Sequence: Synthetic oligonucleotide"
  source 1..20: mol_type = other RNA
cctcagcctcctgagtagct

SEQ ID NO: 4826 - RNA, 20 nt, synthetic construct
  misc_feature 1..20: note = source = /note="Description of Artificial Sequence: Synthetic oligonucleotide"
  source 1..20: mol_type = other RNA
tcctgagtagctgggactac

SEQ ID NO: 4827 - RNA, 20 nt, synthetic construct
  misc_feature 1..20: note = source = /note="Description of Artificial Sequence: Synthetic oligonucleotide"
  source 1..20: mol_type = other RNA
ttttgtatttttagtaaaga

SEQ ID NO: 4828 - RNA, 20 nt, synthetic construct
  misc_feature 1..20: note = source = /note="Description of Artificial Sequence: Synthetic oligonucleotide"
  source 1..20: mol_type = other RNA
tttgtatttttagtaaagat

SEQ ID NO: 4829 - RNA, 20 nt, synthetic construct
  misc_feature 1..20: note = source = /note="Description of Artificial Sequence: Synthetic oligonucleotide"
  source 1..20: mol_type = other RNA
ttgtatttttagtaaagatg

SEQ ID NO: 4830 - RNA, 20 nt, synthetic construct
  misc_feature 1..20: note = source = /note="Description of Artificial Sequence: Synthetic oligonucleotide"
  source 1..20: mol_type = other RNA
aagatggggtttcaccatgt

SEQ ID NO: 4831 - RNA, 20 nt, synthetic construct
  misc_feature 1..20: note = source = /note="Description of Artificial Sequence: Synthetic oligonucleotide"
  source 1..20: mol_type = other RNA
ggggtttcaccatgttggcc

SEQ ID NO: 4832 - RNA, 20 nt, synthetic construct
  misc_feature 1..20: note = source = /note="Description of Artificial Sequence: Synthetic oligonucleotide"
  source 1..20: mol_type = other RNA
tttcaccatgttggccagga

SEQ ID NO: 4833 - RNA, 20 nt, synthetic construct
  misc_feature 1..20: note = source = /note="Description of Artificial Sequence: Synthetic oligonucleotide"
  source 1..20: mol_type = other RNA
gcctcagcctcccaaagtgc

SEQ ID NO: 4834 - RNA, 20 nt, synthetic construct
  misc_feature 1..20: note = source = /note="Description of Artificial Sequence: Synthetic oligonucleotide"
  source 1..20: mol_type = other RNA
cctcagcctcccaaagtgct

SEQ ID NO: 4835 - RNA, 20 nt, synthetic construct
  misc_feature 1..20: note = source = /note="Description of Artificial Sequence: Synthetic oligonucleotide"
  source 1..20: mol_type = other RNA
tcccaaagtgctgggattac

SEQ ID NO: 4836 - RNA, 20 nt, synthetic construct
  misc_feature 1..20: note = source = /note="Description of Artificial Sequence: Synthetic oligonucleotide"
  source 1..20: mol_type = other RNA
caggcttgagccaccacacc

SEQ ID NO: 4837 - RNA, 20 nt, synthetic construct
  misc_feature 1..20: note = source = /note="Description of Artificial Sequence: Synthetic oligonucleotide"
  source 1..20: mol_type = other RNA
gagccaccacacctggcccc

SEQ ID NO: 4838 - RNA, 20 nt, synthetic construct
  misc_feature 1..20: note = source = /note="Description of Artificial Sequence: Synthetic oligonucleotide"
  source 1..20: mol_type = other RNA
agaaaaaagattgacttcac

SEQ ID NO: 4839 - RNA, 20 nt, synthetic construct
  misc_feature 1..20: note = source = /note="Description of Artificial Sequence: Synthetic oligonucleotide"
  source 1..20: mol_type = other RNA
tgagttacttgataatacca

SEQ ID NO: 4840 - RNA, 20 nt, synthetic construct
  misc_feature 1..20: note = source = /note="Description of Artificial Sequence: Synthetic oligonucleotide"
  source 1..20: mol_type = other RNA
ttgaatccttcaaccccttg

SEQ ID NO: 4841 - RNA, 20 nt, synthetic construct
  misc_feature 1..20: note = source = /note="Description of Artificial Sequence: Synthetic oligonucleotide"
  source 1..20: mol_type = other RNA
cttgatacattttttaaagc

SEQ ID NO: 4842 - RNA, 20 nt, synthetic construct
  misc_feature 1..20: note = source = /note="Description of Artificial Sequence: Synthetic oligonucleotide"
  source 1..20: mol_type = other RNA
ttatctcttcttcaaaaaaa

SEQ ID NO: 4843 - RNA, 20 nt, synthetic construct
  misc_feature 1..20: note = source = /note="Description of Artificial Sequence: Synthetic oligonucleotide"
  source 1..20: mol_type = other RNA
cccccacaaatgtgtaattt

SEQ ID NO: 4844 - RNA, 20 nt, synthetic construct
  misc_feature 1..20: note = source = /note="Description of Artificial Sequence: Synthetic oligonucleotide"
  source 1..20: mol_type = other RNA
atttaggaattgttttctat

SEQ ID NO: 4845 - RNA, 20 nt, synthetic construct
  misc_feature 1..20: note = source = /note="Description of Artificial Sequence: Synthetic oligonucleotide"
  source 1..20: mol_type = other RNA
ggaattgttttctattggag

SEQ ID NO: 4846 - RNA, 20 nt, synthetic construct
  misc_feature 1..20: note = source = /note="Description of Artificial Sequence: Synthetic oligonucleotide"
  source 1..20: mol_type = other RNA
attttagttgctctaatgca

SEQ ID NO: 4847 - RNA, 20 nt, synthetic construct
  misc_feature 1..20: note = source = /note="Description of Artificial Sequence: Synthetic oligonucleotide"
  source 1..20: mol_type = other RNA
ggtgtttcctaaaaagttta

SEQ ID NO: 4848 - RNA, 20 nt, synthetic construct
  misc_feature 1..20: note = source = /note="Description of Artificial Sequence: Synthetic oligonucleotide"
  source 1..20: mol_type = other RNA
atgatagtaaataatacaat

SEQ ID NO: 4849 - RNA, 20 nt, synthetic construct
  misc_feature 1..20: note = source = /note="Description of Artificial Sequence: Synthetic oligonucleotide"
  source 1..20: mol_type = other RNA
tgatagtaaataatacaata

SEQ ID NO: 4850 - RNA, 20 nt, synthetic construct
  misc_feature 1..20: note = source = /note="Description of Artificial Sequence: Synthetic oligonucleotide"
  source 1..20: mol_type = other RNA
gatagtaaataatacaatag

SEQ ID NO: 4851 - RNA, 20 nt, synthetic construct
  misc_feature 1..20: note = source = /note="Description of Artificial Sequence: Synthetic oligonucleotide"
  source 1..20: mol_type = other RNA
atagtaaataatacaatagg

SEQ ID NO: 4852 - RNA, 20 nt, synthetic construct
  misc_feature 1..20: note = source = /note="Description of Artificial Sequence: Synthetic oligonucleotide"
  source 1..20: mol_type = other RNA
aaatcaaacagttccacaag

SEQ ID NO: 4853 - RNA, 20 nt, synthetic construct
  misc_feature 1..20: note = source = /note="Description of Artificial Sequence: Synthetic oligonucleotide"
  source 1..20: mol_type = other RNA
ttttaaacttaaccttactg

SEQ ID NO: 4854 - RNA, 20 nt, synthetic construct
  misc_feature 1..20: note = source = /note="Description of Artificial Sequence: Synthetic oligonucleotide"
  source 1..20: mol_type = other RNA
tttaaacttaaccttactga

SEQ ID NO: 4855 - RNA, 20 nt, synthetic construct
  misc_feature 1..20: note = source = /note="Description of Artificial Sequence: Synthetic oligonucleotide"
  source 1..20: mol_type = other RNA
ttaaacttaaccttactgag

SEQ ID NO: 4856 - RNA, 20 nt, synthetic construct
  misc_feature 1..20: note = source = /note="Description of Artificial Sequence: Synthetic oligonucleotide"
  source 1..20: mol_type = other RNA
aaccttactgaggggtttta

SEQ ID NO: 4857 - RNA, 20 nt, synthetic construct
  misc_feature 1..20: note = source = /note="Description of Artificial Sequence: Synthetic oligonucleotide"
  source 1..20: mol_type = other RNA
gcaaagtataaagtaataga

SEQ ID NO: 4858 - RNA, 20 nt, synthetic construct
  misc_feature 1..20: note = source = /note="Description of Artificial Sequence: Synthetic oligonucleotide"
  source 1..20: mol_type = other RNA
aatagaaggttaccaagttg

SEQ ID NO: 4859 - RNA, 20 nt, synthetic construct
  misc_feature 1..20: note = source = /note="Description of Artificial Sequence: Synthetic oligonucleotide"
  source 1..20: mol_type = other RNA
tagtgccaatacagttaaaa

SEQ ID NO: 4860 - RNA, 20 nt, synthetic construct
  misc_feature 1..20: note = source = /note="Description of Artificial Sequence: Synthetic oligonucleotide"
  source 1..20: mol_type = other RNA
ttaacagaacatcttcatcc

SEQ ID NO: 4861 - RNA, 20 nt, synthetic construct
  misc_feature 1..20: note = source = /note="Description of Artificial Sequence: Synthetic oligonucleotide"
  source 1..20: mol_type = other RNA
tttttttttttttttcagac

SEQ ID NO: 4862 - RNA, 20 nt, synthetic construct
  misc_feature 1..20: note = source = /note="Description of Artificial Sequence: Synthetic oligonucleotide"
  source 1..20: mol_type = other RNA
ttttttttttttttcagaca

SEQ ID NO: 4863 - RNA, 20 nt, synthetic construct
  misc_feature 1..20: note = source = /note="Description of Artificial Sequence: Synthetic oligonucleotide"
  source 1..20: mol_type = other RNA
cactcctgttgcccagactg

SEQ ID NO: 4864 - RNA, 20 nt, synthetic construct
  misc_feature 1..20: note = source = /note="Description of Artificial Sequence: Synthetic oligonucleotide"
  source 1..20: mol_type = other RNA
ttgcccagactgcggtgcag

SEQ ID NO: 4865 - RNA, 20 nt, synthetic construct
  misc_feature 1..20: note = source = /note="Description of Artificial Sequence: Synthetic oligonucleotide"
  source 1..20: mol_type = other RNA
gcggtgcagtggcctgattg

SEQ ID NO: 4866 - RNA, 20 nt, synthetic construct
  misc_feature 1..20: note = source = /note="Description of Artificial Sequence: Synthetic oligonucleotide"
  source 1..20: mol_type = other RNA
cactgcagcctcaacttccc

SEQ ID NO: 4867 - RNA, 20 nt, synthetic construct
  misc_feature 1..20: note = source = /note="Description of Artificial Sequence: Synthetic oligonucleotide"
  source 1..20: mol_type = other RNA
agcctcaacttcccaggctc

SEQ ID NO: 4868 - RNA, 20 nt, synthetic construct
  misc_feature 1..20: note = source = /note="Description of Artificial Sequence: Synthetic oligonucleotide"
  source 1..20: mol_type = other RNA
tccagagtagctgagaccac

SEQ ID NO: 4869 - RNA, 20 nt, synthetic construct
  misc_feature 1..20: note = source = /note="Description of Artificial Sequence: Synthetic oligonucleotide"
  source 1..20: mol_type = other RNA
ccagagtagctgagaccaca

SEQ ID NO: 4870 - RNA, 20 nt, synthetic construct
  misc_feature 1..20: note = source = /note="Description of Artificial Sequence: Synthetic oligonucleotide"
  source 1..20: mol_type = other RNA
cagagtagctgagaccacag

SEQ ID NO: 4871 - RNA, 20 nt, synthetic construct
  misc_feature 1..20: note = source = /note="Description of Artificial Sequence: Synthetic oligonucleotide"
  source 1..20: mol_type = other RNA
caggggcatgccaccacccc

SEQ ID NO: 4872 - RNA, 20 nt, synthetic construct
  misc_feature 1..20: note = source = /note="Description of Artificial Sequence: Synthetic oligonucleotide"
  source 1..20: mol_type = other RNA
tttgtattttttgtagagac

SEQ ID NO: 4873 - RNA, 20 nt, synthetic construct
  misc_feature 1..20: note = source = /note="Description of Artificial Sequence: Synthetic oligonucleotide"
  source 1..20: mol_type = other RNA
ttgtattttttgtagagaca

SEQ ID NO: 4874 - RNA, 20 nt, synthetic construct
  misc_feature 1..20: note = source = /note="Description of Artificial Sequence: Synthetic oligonucleotide"
  source 1..20: mol_type = other RNA
agggttttgccatgttgccc

SEQ ID NO: 4875 - RNA, 20 nt, synthetic construct
  misc_feature 1..20: note = source = /note="Description of Artificial Sequence: Synthetic oligonucleotide"
  source 1..20: mol_type = other RNA
ccaggctgttcgcaaactcc

SEQ ID NO: 4876 - RNA, 20 nt, synthetic construct
  misc_feature 1..20: note = source = /note="Description of Artificial Sequence: Synthetic oligonucleotide"
  source 1..20: mol_type = other RNA
ctcaagcaatccacctgcct

SEQ ID NO: 4877 - RNA, 20 nt, synthetic construct
  misc_feature 1..20: note = source = /note="Description of Artificial Sequence: Synthetic oligonucleotide"
  source 1..20: mol_type = other RNA
gcctcggcttcccaaagtgc

SEQ ID NO: 4878 - RNA, 20 nt, synthetic construct
  misc_feature 1..20: note = source = /note="Description of Artificial Sequence: Synthetic oligonucleotide"
  source 1..20: mol_type = other RNA
ttcccaaagtgctggaatta

SEQ ID NO: 4879 - RNA, 20 nt, synthetic construct
  misc_feature 1..20: note = source = /note="Description of Artificial Sequence: Synthetic oligonucleotide"
  source 1..20: mol_type = other RNA
tcccaaagtgctggaattat

SEQ ID NO: 4880 - RNA, 20 nt, synthetic construct
  misc_feature 1..20: note = source = /note="Description of Artificial Sequence: Synthetic oligonucleotide"
  source 1..20: mol_type = other RNA
gctgccacacccagcccctc

SEQ ID NO: 4881 - RNA, 20 nt, synthetic construct
  misc_feature 1..20: note = source = /note="Description of Artificial Sequence: Synthetic oligonucleotide"
  source 1..20: mol_type = other RNA
attaccaacttctgtcttcc

SEQ ID NO: 4882 - RNA, 20 nt, synthetic construct
  misc_feature 1..20: note = source = /note="Description of Artificial Sequence: Synthetic oligonucleotide"
  source 1..20: mol_type = other RNA
cttccaggtttttatgtcct

SEQ ID NO: 4883 - RNA, 20 nt, synthetic construct
  misc_feature 1..20: note = source = /note="Description of Artificial Sequence: Synthetic oligonucleotide"
  source 1..20: mol_type = other RNA
aaatttatgcatatttttag

SEQ ID NO: 4884 - RNA, 20 nt, synthetic construct
  misc_feature 1..20: note = source = /note="Description of Artificial Sequence: Synthetic oligonucleotide"
  source 1..20: mol_type = other RNA
atactttaacttattataga

SEQ ID NO: 4885 - RNA, 20 nt, synthetic construct
  misc_feature 1..20: note = source = /note="Description of Artificial Sequence: Synthetic oligonucleotide"
  source 1..20: mol_type = other RNA
tagaaggcttacaaaaactg

SEQ ID NO: 4886 - RNA, 20 nt, synthetic construct
  misc_feature 1..20: note = source = /note="Description of Artificial Sequence: Synthetic oligonucleotide"
  source 1..20: mol_type = other RNA
gtgaagcagcgaatttctag

SEQ ID NO: 4887 - RNA, 20 nt, synthetic construct
  misc_feature 1..20: note = source = /note="Description of Artificial Sequence: Synthetic oligonucleotide"
  source 1..20: mol_type = other RNA
agcagcgaatttctagaggc

SEQ ID NO: 4888 - RNA, 20 nt, synthetic construct
  misc_feature 1..20: note = source = /note="Description of Artificial Sequence: Synthetic oligonucleotide"
  source 1..20: mol_type = other RNA
gcagcgaatttctagaggct

SEQ ID NO: 4889 - RNA, 20 nt, synthetic construct
  misc_feature 1..20: note = source = /note="Description of Artificial Sequence: Synthetic oligonucleotide"
  source 1..20: mol_type = other RNA
agaggctgggttcacgcttc

SEQ ID NO: 4890 - RNA, 20 nt, synthetic construct
  misc_feature 1..20: note = source = /note="Description of Artificial Sequence: Synthetic oligonucleotide"
  source 1..20: mol_type = other RNA
cttcaggtcctctaaatcct

SEQ ID NO: 4891 - RNA, 20 nt, synthetic construct
  misc_feature 1..20: note = source = /note="Description of Artificial Sequence: Synthetic oligonucleotide"
  source 1..20: mol_type = other RNA
aatttttattgaacaaatac

SEQ ID NO: 4892 - RNA, 20 nt, synthetic construct
  misc_feature 1..20: note = source = /note="Description of Artificial Sequence: Synthetic oligonucleotide"
  source 1..20: mol_type = other RNA
ctcattgctcttgaatacat

SEQ ID NO: 4893 - RNA, 20 nt, synthetic construct
  misc_feature 1..20: note = source = /note="Description of Artificial Sequence: Synthetic oligonucleotide"
  source 1..20: mol_type = other RNA
tgaaattctgttttccttaa

SEQ ID NO: 4894 - RNA, 20 nt, synthetic construct
  misc_feature 1..20: note = source = /note="Description of Artificial Sequence: Synthetic oligonucleotide"
  source 1..20: mol_type = other RNA
ccttaaaggcagtcattttt

SEQ ID NO: 4895 - RNA, 20 nt, synthetic construct
  misc_feature 1..20: note = source = /note="Description of Artificial Sequence: Synthetic oligonucleotide"
  source 1..20: mol_type = other RNA
tagtaacatcataacttcag

SEQ ID NO: 4896 - RNA, 20 nt, synthetic construct
  misc_feature 1..20: note = source = /note="Description of Artificial Sequence: Synthetic oligonucleotide"
  source 1..20: mol_type = other RNA
atatgcctacttttcatatc

SEQ ID NO: 4897 - RNA, 20 nt, synthetic construct
  misc_feature 1..20: note = source = /note="Description of Artificial Sequence: Synthetic oligonucleotide"
  source 1..20: mol_type = other RNA
aattgctgtcaacaaagtag

SEQ ID NO: 4898 - RNA, 20 nt, synthetic construct
  misc_feature 1..20: note = source = /note="Description of Artificial Sequence: Synthetic oligonucleotide"
  source 1..20: mol_type = other RNA
ttcattgtgaaaacatgaaa

SEQ ID NO: 4899 - RNA, 20 nt, synthetic construct
  misc_feature 1..20: note = source = /note="Description of Artificial Sequence: Synthetic oligonucleotide"
  source 1..20: mol_type = other RNA
atggctgttaactatacatc

SEQ ID NO: 4900 - RNA, 20 nt, synthetic construct
  misc_feature 1..20: note = source = /note="Description of Artificial Sequence: Synthetic oligonucleotide"
  source 1..20: mol_type = other RNA
acatcaggcaaaataaaaac

SEQ ID NO: 4901 - RNA, 20 nt, synthetic construct
  misc_feature 1..20: note = source = /note="Description of Artificial Sequence: Synthetic oligonucleotide"
  source 1..20: mol_type = other RNA
caggaaatataaacatttcc

SEQ ID NO: 4902 - RNA, 20 nt, synthetic construct
  misc_feature 1..20: note = source = /note="Description of Artificial Sequence: Synthetic oligonucleotide"
  source 1..20: mol_type = other RNA
atataaacatttcctggaac

SEQ ID NO: 4903 - RNA, 20 nt, synthetic construct
  misc_feature 1..20: note = source = /note="Description of Artificial Sequence: Synthetic oligonucleotide"
  source 1..20: mol_type = other RNA
tataaacatttcctggaaca

SEQ ID NO: 4904 - RNA, 20 nt, synthetic construct
  misc_feature 1..20: note = source = /note="Description of Artificial Sequence: Synthetic oligonucleotide"
  source 1..20: mol_type = other RNA
agggcagagtatgagtaata

SEQ ID NO: 4905 - RNA, 20 nt, synthetic construct
  misc_feature 1..20: note = source = /note="Description of Artificial Sequence: Synthetic oligonucleotide"
  source 1..20: mol_type = other RNA
aataaggtatcaaatataat

SEQ ID NO: 4906 - RNA, 20 nt, synthetic construct
  misc_feature 1..20: note = source = /note="Description of Artificial Sequence: Synthetic oligonucleotide"
  source 1..20: mol_type = other RNA
aatgtcttaagaaatgtcac

SEQ ID NO: 4907 - RNA, 20 nt, synthetic construct
  misc_feature 1..20: note = source = /note="Description of Artificial Sequence: Synthetic oligonucleotide"
  source 1..20: mol_type = other RNA
agaaatgtcactggaaagac

SEQ ID NO: 4908 - RNA, 20 nt, synthetic construct
  misc_feature 1..20: note = source = /note="Description of Artificial Sequence: Synthetic oligonucleotide"
  source 1..20: mol_type = other RNA
actggaaagactggagtact

SEQ ID NO: 4909 - RNA, 20 nt, synthetic construct
  misc_feature 1..20: note = source = /note="Description of Artificial Sequence: Synthetic oligonucleotide"
  source 1..20: mol_type = other RNA
ttgattcctaacactgtgct

SEQ ID NO: 4910 - RNA, 20 nt, synthetic construct
  misc_feature 1..20: note = source = /note="Description of Artificial Sequence: Synthetic oligonucleotide"
  source 1..20: mol_type = other RNA
ctaacactgtgcttggcaca

SEQ ID NO: 4911 - RNA, 20 nt, synthetic construct
  misc_feature 1..20: note = source = /note="Description of Artificial Sequence: Synthetic oligonucleotide"
  source 1..20: mol_type = other RNA
cactgtgcttggcacatggt

SEQ ID NO: 4912 - RNA, 20 nt, synthetic construct
  misc_feature 1..20: note = source = /note="Description of Artificial Sequence: Synthetic oligonucleotide"
  source 1..20: mol_type = other RNA
ggtaattaataaatgtgtga

SEQ ID NO: 4913 - RNA, 20 nt, synthetic construct
  misc_feature 1..20: note = source = /note="Description of Artificial Sequence: Synthetic oligonucleotide"
  source 1..20: mol_type = other RNA
caattagtgactaagagagt

SEQ ID NO: 4914 - RNA, 20 nt, synthetic construct
  misc_feature 1..20: note = source = /note="Description of Artificial Sequence: Synthetic oligonucleotide"
  source 1..20: mol_type = other RNA
agtgactaagagagttggaa

SEQ ID NO: 4915 - RNA, 20 nt, synthetic construct
  misc_feature 1..20: note = source = /note="Description of Artificial Sequence: Synthetic oligonucleotide"
  source 1..20: mol_type = other RNA
gtgactaagagagttggaaa

SEQ ID NO: 4916 - RNA, 20 nt, synthetic construct
  misc_feature 1..20: note = source = /note="Description of Artificial Sequence: Synthetic oligonucleotide"
  source 1..20: mol_type = other RNA
aagggctatcaatttcaaat

SEQ ID NO: 4917 - RNA, 20 nt, synthetic construct
  misc_feature 1..20: note = source = /note="Description of Artificial Sequence: Synthetic oligonucleotide"
  source 1..20: mol_type = other RNA
agacatttttacgtaagatt

SEQ ID NO: 4918 - RNA, 20 nt, synthetic construct
  misc_feature 1..20: note = source = /note="Description of Artificial Sequence: Synthetic oligonucleotide"
  source 1..20: mol_type = other RNA
gacatttttacgtaagattt

SEQ ID NO: 4919 - RNA, 20 nt, synthetic construct
  misc_feature 1..20: note = source = /note="Description of Artificial Sequence: Synthetic oligonucleotide"
  source 1..20: mol_type = other RNA
ccattcctacattgaccatg

SEQ ID NO: 4920 - RNA, 20 nt, synthetic construct
  misc_feature 1..20: note = source = /note="Description of Artificial Sequence: Synthetic oligonucleotide"
  source 1..20: mol_type = other RNA
tgaccatgtggactcatatt

SEQ ID NO: 4921 - RNA, 20 nt, synthetic construct
  misc_feature 1..20: note = source = /note="Description of Artificial Sequence: Synthetic oligonucleotide"
  source 1..20: mol_type = other RNA
ataaacaaagcaccaaaagt

SEQ ID NO: 4922 - RNA, 20 nt, synthetic construct
  misc_feature 1..20: note = source = /note="Description of Artificial Sequence: Synthetic oligonucleotide"
  source 1..20: mol_type = other RNA
aaagcaccaaaagttggaaa

SEQ ID NO: 4923 - RNA, 20 nt, synthetic construct
  misc_feature 1..20: note = source = /note="Description of Artificial Sequence: Synthetic oligonucleotide"
  source 1..20: mol_type = other RNA
ttggaaaaggaagtagtagt

SEQ ID NO: 4924 - RNA, 20 nt, synthetic construct
  misc_feature 1..20: note = source = /note="Description of Artificial Sequence: Synthetic oligonucleotide"
  source 1..20: mol_type = other RNA
aaaggaagtagtagtaggag

SEQ ID NO: 4925 - RNA, 20 nt, synthetic construct
  misc_feature 1..20: note = source = /note="Description of Artificial Sequence: Synthetic oligonucleotide"
  source 1..20: mol_type = other RNA
aaggaagtagtagtaggaga

SEQ ID NO: 4926 - RNA, 20 nt, synthetic construct
  misc_feature 1..20: note = source = /note="Description of Artificial Sequence: Synthetic oligonucleotide"
  source 1..20: mol_type = other RNA
gttttaagctatgtatttac

SEQ ID NO: 4927 - RNA, 20 nt, synthetic construct
  misc_feature 1..20: note = source = /note="Description of Artificial Sequence: Synthetic oligonucleotide"
  source 1..20: mol_type = other RNA
ttttaagctatgtatttact

SEQ ID NO: 4928 - RNA, 20 nt, synthetic construct
  misc_feature 1..20: note = source = /note="Description of Artificial Sequence: Synthetic oligonucleotide"
  source 1..20: mol_type = other RNA
taaacagtactgtaatcact

SEQ ID NO: 4929 - RNA, 20 nt, synthetic construct
  misc_feature 1..20: note = source = /note="Description of Artificial Sequence: Synthetic oligonucleotide"
  source 1..20: mol_type = other RNA
aaacagtactgtaatcactt

SEQ ID NO: 4930 - RNA, 20 nt, synthetic construct
  misc_feature 1..20: note = source = /note="Description of Artificial Sequence: Synthetic oligonucleotide"
  source 1..20: mol_type = other RNA
atgtgctttgtgtcagacaa

SEQ ID NO: 4931 - RNA, 20 nt, synthetic construct
  misc_feature 1..20: note = source = /note="Description of Artificial Sequence: Synthetic oligonucleotide"
  source 1..20: mol_type = other RNA
aatacattacattacacaga

SEQ ID NO: 4932 - RNA, 20 nt, synthetic construct
  misc_feature 1..20: note = source = /note="Description of Artificial Sequence: Synthetic oligonucleotide"
  source 1..20: mol_type = other RNA
atacattacattacacagaa

SEQ ID NO: 4933 - RNA, 20 nt, synthetic construct
  misc_feature 1..20: note = source = /note="Description of Artificial Sequence: Synthetic oligonucleotide"
  source 1..20: mol_type = other RNA
attacacagaagggagtgcc

SEQ ID NO: 4934 - RNA, 20 nt, synthetic construct
  misc_feature 1..20: note = source = /note="Description of Artificial Sequence: Synthetic oligonucleotide"
  source 1..20: mol_type = other RNA
aatacattacattacacaga

SEQ ID NO: 4935 - RNA, 20 nt, synthetic construct
  misc_feature 1..20: note = source = /note="Description of Artificial Sequence: Synthetic oligonucleotide"
  source 1..20: mol_type = other RNA
atacattacattacacagaa

SEQ ID NO: 4936 - RNA, 20 nt, synthetic construct
  misc_feature 1..20: note = source = /note="Description of Artificial Sequence: Synthetic oligonucleotide"
  source 1..20: mol_type = other RNA
attacacagaagggagtgcc

SEQ ID NO: 4937 - RNA, 20 nt, synthetic construct
  misc_feature 1..20: note = source = /note="Description of Artificial Sequence: Synthetic oligonucleotide"
  source 1..20: mol_type = other RNA
aatacattacattacacaga

SEQ ID NO: 4938 - RNA, 20 nt, synthetic construct
  misc_feature 1..20: note = source = /note="Description of Artificial Sequence: Synthetic oligonucleotide"
  source 1..20: mol_type = other RNA
atacattacattacacagaa

SEQ ID NO: 4939 - RNA, 20 nt, synthetic construct
  misc_feature 1..20: note = source = /note="Description of Artificial Sequence: Synthetic oligonucleotide"
  source 1..20: mol_type = other RNA
attacacagaagggagtgcc

SEQ ID NO: 4940 - RNA, 20 nt, synthetic construct
  misc_feature 1..20: note = source = /note="Description of Artificial Sequence: Synthetic oligonucleotide"
  source 1..20: mol_type = other RNA
cagaagggagtgcctggctt

SEQ ID NO: 4941 - RNA, 20 nt, synthetic construct
  misc_feature 1..20: note = source = /note="Description of Artificial Sequence: Synthetic oligonucleotide"
  source 1..20: mol_type = other RNA
agaagggagtgcctggcttt

SEQ ID NO: 4942 - RNA, 20 nt, synthetic construct
  misc_feature 1..20: note = source = /note="Description of Artificial Sequence: Synthetic oligonucleotide"
  source 1..20: mol_type = other RNA
catagcacaatgctgccata

SEQ ID NO: 4943 - RNA, 20 nt, synthetic construct
  misc_feature 1..20: note = source = /note="Description of Artificial Sequence: Synthetic oligonucleotide"
  source 1..20: mol_type = other RNA
gcacaatgctgccatacggt

SEQ ID NO: 4944 - RNA, 20 nt, synthetic construct
  misc_feature 1..20: note = source = /note="Description of Artificial Sequence: Synthetic oligonucleotide"
  source 1..20: mol_type = other RNA
aggtaataccaagacaaatc

SEQ ID NO: 4945 - RNA, 20 nt, synthetic construct
  misc_feature 1..20: note = source = /note="Description of Artificial Sequence: Synthetic oligonucleotide"
  source 1..20: mol_type = other RNA
ggtaataccaagacaaatca

SEQ ID NO: 4946 - RNA, 20 nt, synthetic construct
  misc_feature 1..20: note = source = /note="Description of Artificial Sequence: Synthetic oligonucleotide"
  source 1..20: mol_type = other RNA
ggccgttattaacaaccttg

SEQ ID NO: 4947 - RNA, 20 nt, synthetic construct
  misc_feature 1..20: note = source = /note="Description of Artificial Sequence: Synthetic oligonucleotide"
  source 1..20: mol_type = other RNA
acaaccttgaggaaatgtct

SEQ ID NO: 4948 - RNA, 20 nt, synthetic construct
  misc_feature 1..20: note = source = /note="Description of Artificial Sequence: Synthetic oligonucleotide"
  source 1..20: mol_type = other RNA
caaccttgaggaaatgtctt

SEQ ID NO: 4949 - RNA, 20 nt, synthetic construct
  misc_feature 1..20: note = source = /note="Description of Artificial Sequence: Synthetic oligonucleotide"
  source 1..20: mol_type = other RNA
atttttgtttaattataata

SEQ ID NO: 4950 - RNA, 20 nt, synthetic construct
  misc_feature 1..20: note = source = /note="Description of Artificial Sequence: Synthetic oligonucleotide"
  source 1..20: mol_type = other RNA
aagtcatcccaaactcttcg

SEQ ID NO: 4951 - RNA, 20 nt, synthetic construct
  misc_feature 1..20: note = source = /note="Description of Artificial Sequence: Synthetic oligonucleotide"
  source 1..20: mol_type = other RNA
ctgttttttaatgtttctaa

SEQ ID NO: 4952 - RNA, 20 nt, synthetic construct
  misc_feature 1..20: note = source = /note="Description of Artificial Sequence: Synthetic oligonucleotide"
  source 1..20: mol_type = other RNA
tgtataatctattagaaaac

SEQ ID NO: 4953 - RNA, 20 nt, synthetic construct
  misc_feature 1..20: note = source = /note="Description of Artificial Sequence: Synthetic oligonucleotide"
  source 1..20: mol_type = other RNA
agaaaactggccaagtgcag

SEQ ID NO: 4954 - RNA, 20 nt, synthetic construct
  misc_feature 1..20: note = source = /note="Description of Artificial Sequence: Synthetic oligonucleotide"
  source 1..20: mol_type = other RNA
tgcctgtaatcgcagcactt

SEQ ID NO: 4955 - RNA, 20 nt, synthetic construct
  misc_feature 1..20: note = source = /note="Description of Artificial Sequence: Synthetic oligonucleotide"
  source 1..20: mol_type = other RNA
gcctgtaatcgcagcacttt

SEQ ID NO: 4956 - RNA, 20 nt, synthetic construct
  misc_feature 1..20: note = source = /note="Description of Artificial Sequence: Synthetic oligonucleotide"
  source 1..20: mol_type = other RNA
tgtaatcgcagcactttggg

SEQ ID NO: 4957 - RNA, 20 nt, synthetic construct
  misc_feature 1..20: note = source = /note="Description of Artificial Sequence: Synthetic oligonucleotide"
  source 1..20: mol_type = other RNA
cgcagcactttgggaggcca

SEQ ID NO: 4958 - RNA, 20 nt, synthetic construct
  misc_feature 1..20: note = source = /note="Description of Artificial Sequence: Synthetic oligonucleotide"
  source 1..20: mol_type = other RNA
agcactttgggaggccaagg

SEQ ID NO: 4959 - RNA, 20 nt, synthetic construct
  misc_feature 1..20: note = source = /note="Description of Artificial Sequence: Synthetic oligonucleotide"
  source 1..20: mol_type = other RNA
gcactttgggaggccaaggc

SEQ ID NO: 4960 - RNA, 20 nt, synthetic construct
  misc_feature 1..20: note = source = /note="Description of Artificial Sequence: Synthetic oligonucleotide"
  source 1..20: mol_type = other RNA
caaggcgggtagattacctg

SEQ ID NO: 4961 - RNA, 20 nt, synthetic construct
  misc_feature 1..20: note = source = /note="Description of Artificial Sequence: Synthetic oligonucleotide"
  source 1..20: mol_type = other RNA
cgggtagattacctgaggtc

SEQ ID NO: 4962 - RNA, 20 nt, synthetic construct
  misc_feature 1..20: note = source = /note="Description of Artificial Sequence: Synthetic oligonucleotide"
  source 1..20: mol_type = other RNA
tgagaccagcctagccaata

SEQ ID NO: 4963 - RNA, 20 nt, synthetic construct
  misc_feature 1..20: note = source = /note="Description of Artificial Sequence: Synthetic oligonucleotide"
  source 1..20: mol_type = other RNA
taaaaatacaaaaattagcc

SEQ ID NO: 4964 - RNA, 20 nt, synthetic construct
  misc_feature 1..20: note = source = /note="Description of Artificial Sequence: Synthetic oligonucleotide"
  source 1..20: mol_type = other RNA
caaaaattagccaggcgtag

SEQ ID NO: 4965 - RNA, 20 nt, synthetic construct
  misc_feature 1..20: note = source = /note="Description of Artificial Sequence: Synthetic oligonucleotide"
  source 1..20: mol_type = other RNA
gcctgtaatcccagctactc

SEQ ID NO: 4966 - RNA, 20 nt, synthetic construct
  misc_feature 1..20: note = source = /note="Description of Artificial Sequence: Synthetic oligonucleotide"
  source 1..20: mol_type = other RNA
tgtaatcccagctactcagg

SEQ ID NO: 4967 - RNA, 20 nt, synthetic construct
  misc_feature 1..20: note = source = /note="Description of Artificial Sequence: Synthetic oligonucleotide"
  source 1..20: mol_type = other RNA
cccagctactcaggaggctg

SEQ ID NO: 4968 - RNA, 20 nt, synthetic construct
  misc_feature 1..20: note = source = /note="Description of Artificial Sequence: Synthetic oligonucleotide"
  source 1..20: mol_type = other RNA
gctactcaggaggctgaggc

SEQ ID NO: 4969 - RNA, 20 nt, synthetic construct
  misc_feature 1..20: note = source = /note="Description of Artificial Sequence: Synthetic oligonucleotide"
  source 1..20: mol_type = other RNA
gcaggagaatctcttgaacc

SEQ ID NO: 4970 - RNA, 20 nt, synthetic construct
  misc_feature 1..20: note = source = /note="Description of Artificial Sequence: Synthetic oligonucleotide"
  source 1..20: mol_type = other RNA
caggagaatctcttgaaccc

SEQ ID NO: 4971 - RNA, 20 nt, synthetic construct
  misc_feature 1..20: note = source = /note="Description of Artificial Sequence: Synthetic oligonucleotide"
  source 1..20: mol_type = other RNA
gagaatctcttgaacccggg

SEQ ID NO: 4972 - RNA, 20 nt, synthetic construct
  misc_feature 1..20: note = source = /note="Description of Artificial Sequence: Synthetic oligonucleotide"
  source 1..20: mol_type = other RNA
tctcttgaacccgggaggcg

SEQ ID NO: 4973 - RNA, 20 nt, synthetic construct
  misc_feature 1..20: note = source = /note="Description of Artificial Sequence: Synthetic oligonucleotide"
  source 1..20: mol_type = other RNA
cgcgtcactgcattccagcc

SEQ ID NO: 4974 - RNA, 20 nt, synthetic construct
  misc_feature 1..20: note = source = /note="Description of Artificial Sequence: Synthetic oligonucleotide"
  source 1..20: mol_type = other RNA
gcgtcactgcattccagcct

SEQ ID NO: 4975 - RNA, 20 nt, synthetic construct
  misc_feature 1..20: note = source = /note="Description of Artificial Sequence: Synthetic oligonucleotide"
  source 1..20: mol_type = other RNA
ctgcattccagcctgggcga

SEQ ID NO: 4976 - RNA, 20 nt, synthetic construct
  misc_feature 1..20: note = source = /note="Description of Artificial Sequence: Synthetic oligonucleotide"
  source 1..20: mol_type = other RNA
ttaagcatctctcttcctca

SEQ ID NO: 4977 - RNA, 20 nt, synthetic construct
  misc_feature 1..20: note = source = /note="Description of Artificial Sequence: Synthetic oligonucleotide"
  source 1..20: mol_type = other RNA
ttgaatccttagtgcatatg

SEQ ID NO: 4978 - RNA, 20 nt, synthetic construct
  misc_feature 1..20: note = source = /note="Description of Artificial Sequence: Synthetic oligonucleotide"
  source 1..20: mol_type = other RNA
attagacatcatgtaatatc

SEQ ID NO: 4979 - RNA, 20 nt, synthetic construct
  misc_feature 1..20: note = source = /note="Description of Artificial Sequence: Synthetic oligonucleotide"
  source 1..20: mol_type = other RNA
aactaagaataatttaccaa

SEQ ID NO: 4980 - RNA, 20 nt, synthetic construct
  misc_feature 1..20: note = source = /note="Description of Artificial Sequence: Synthetic oligonucleotide"
  source 1..20: mol_type = other RNA
acattaagagttacgtttct

SEQ ID NO: 4981 - RNA, 20 nt, synthetic construct
  misc_feature 1..20: note = source = /note="Description of Artificial Sequence: Synthetic oligonucleotide"
  source 1..20: mol_type = other RNA
aaaattgaaaagaatatctg

SEQ ID NO: 4982 - RNA, 20 nt, synthetic construct
  misc_feature 1..20: note = source = /note="Description of Artificial Sequence: Synthetic oligonucleotide"
  source 1..20: mol_type = other RNA
aaagaatatctgtggcacaa

SEQ ID NO: 4983 - RNA, 20 nt, synthetic construct
  misc_feature 1..20: note = source = /note="Description of Artificial Sequence: Synthetic oligonucleotide"
  source 1..20: mol_type = other RNA
aagaatatctgtggcacaat

SEQ ID NO: 4984 - RNA, 20 nt, synthetic construct
  misc_feature 1..20: note = source = /note="Description of Artificial Sequence: Synthetic oligonucleotide"
  source 1..20: mol_type = other RNA
atctgtggcacaatgggctc

SEQ ID NO: 4985 - RNA, 20 nt, synthetic construct
  misc_feature 1..20: note = source = /note="Description of Artificial Sequence: Synthetic oligonucleotide"
  source 1..20: mol_type = other RNA
tctgtggcacaatgggctct

SEQ ID NO: 4986 - RNA, 20 nt, synthetic construct
  misc_feature 1..20: note = source = /note="Description of Artificial Sequence: Synthetic oligonucleotide"
  source 1..20: mol_type = other RNA
tgggctctgggtataattgc

SEQ ID NO: 4987 - RNA, 20 nt, synthetic construct
  misc_feature 1..20: note = source = /note="Description of Artificial Sequence: Synthetic oligonucleotide"
  source 1..20: mol_type = other RNA
gtttaaagaatattttcaat

SEQ ID NO: 4988 - RNA, 20 nt, synthetic construct
  misc_feature 1..20: note = source = /note="Description of Artificial Sequence: Synthetic oligonucleotide"
  source 1..20: mol_type = other RNA
caataggtataagtttattt

SEQ ID NO: 4989 - RNA, 20 nt, synthetic construct
  misc_feature 1..20: note = source = /note="Description of Artificial Sequence: Synthetic oligonucleotide"
  source 1..20: mol_type = other RNA
tttagcagtatatatttccc

SEQ ID NO: 4990 - RNA, 20 nt, synthetic construct
  misc_feature 1..20: note = source = /note="Description of Artificial Sequence: Synthetic oligonucleotide"
  source 1..20: mol_type = other RNA
cctggaacaccatgcactct

SEQ ID NO: 4991 - RNA, 20 nt, synthetic construct
  misc_feature 1..20: note = source = /note="Description of Artificial Sequence: Synthetic oligonucleotide"
  source 1..20: mol_type = other RNA
ctctaggttttctaatttat

SEQ ID NO: 4992 - RNA, 20 nt, synthetic construct
  misc_feature 1..20: note = source = /note="Description of Artificial Sequence: Synthetic oligonucleotide"
  source 1..20: mol_type = other RNA
atttattggtttaaaataca

SEQ ID NO: 4993 - RNA, 20 nt, synthetic construct
  misc_feature 1..20: note = source = /note="Description of Artificial Sequence: Synthetic oligonucleotide"
  source 1..20: mol_type = other RNA
taaatattctctgtatctgt

SEQ ID NO: 4994 - RNA, 20 nt, synthetic construct
  misc_feature 1..20: note = source = /note="Description of Artificial Sequence: Synthetic oligonucleotide"
  source 1..20: mol_type = other RNA
attcactagattattttcca

SEQ ID NO: 4995 - RNA, 20 nt, synthetic construct
  misc_feature 1..20: note = source = /note="Description of Artificial Sequence: Synthetic oligonucleotide"
  source 1..20: mol_type = other RNA
gttttcctaaattagtgatt

SEQ ID NO: 4996 - RNA, 20 nt, synthetic construct
  misc_feature 1..20: note = source = /note="Description of Artificial Sequence: Synthetic oligonucleotide"
  source 1..20: mol_type = other RNA
tatagccaatgcattttgag

SEQ ID NO: 4997 - RNA, 20 nt, synthetic construct
  misc_feature 1..20: note = source = /note="Description of Artificial Sequence: Synthetic oligonucleotide"
  source 1..20: mol_type = other RNA
ctttgaacaaagagttattt

SEQ ID NO: 4998 - RNA, 20 nt, synthetic construct
  misc_feature 1..20: note = source = /note="Description of Artificial Sequence: Synthetic oligonucleotide"
  source 1..20: mol_type = other RNA
agagttatttaggaaaagaa

SEQ ID NO: 4999 - RNA, 20 nt, synthetic construct
  misc_feature 1..20: note = source = /note="Description of Artificial Sequence: Synthetic oligonucleotide"
  source 1..20: mol_type = other RNA
tacttctttatattttgttg

SEQ ID NO: 5000 - RNA, 20 nt, synthetic construct
  misc_feature 1..20: note = source = /note="Description of Artificial Sequence: Synthetic oligonucleotide"
  source 1..20: mol_type = other RNA
ctaagaaaattttctttgtc

SEQ ID NO: 5001 - RNA, 20 nt, synthetic construct
  misc_feature 1..20: note = source = /note="Description of Artificial Sequence: Synthetic oligonucleotide"
  source 1..20: mol_type = other RNA
aaattttctttgtcaggata

SEQ ID NO: 5002 - RNA, 20 nt, synthetic construct
  misc_feature 1..20: note = source = /note="Description of Artificial Sequence: Synthetic oligonucleotide"
  source 1..20: mol_type = other RNA
ttgtcaggataaggcacatg

SEQ ID NO: 5003 - RNA, 20 nt, synthetic construct
  misc_feature 1..20: note = source = /note="Description of Artificial Sequence: Synthetic oligonucleotide"
  source 1..20: mol_type = other RNA
gaagtcccccccaacccaat

SEQ ID NO: 5004 - RNA, 20 nt, synthetic construct
  misc_feature 1..20: note = source = /note="Description of Artificial Sequence: Synthetic oligonucleotide"
  source 1..20: mol_type = other RNA
tcctattcacacattcttga

SEQ ID NO: 5005 - RNA, 20 nt, synthetic construct
  misc_feature 1..20: note = source = /note="Description of Artificial Sequence: Synthetic oligonucleotide"
  source 1..20: mol_type = other RNA
gtttttcactcttgttgcct

SEQ ID NO: 5006 - RNA, 20 nt, synthetic construct
  misc_feature 1..20: note = source = /note="Description of Artificial Sequence: Synthetic oligonucleotide"
  source 1..20: mol_type = other RNA
ttcactcttgttgcctaggc

SEQ ID NO: 5007 - RNA, 20 nt, synthetic construct
  misc_feature 1..20: note = source = /note="Description of Artificial Sequence: Synthetic oligonucleotide"
  source 1..20: mol_type = other RNA
ttgcctaggctggagtgcaa

SEQ ID NO: 5008 - RNA, 20 nt, synthetic construct
  misc_feature 1..20: note = source = /note="Description of Artificial Sequence: Synthetic oligonucleotide"
  source 1..20: mol_type = other RNA
ctaggctggagtgcaatggc

SEQ ID NO: 5009 - RNA, 20 nt, synthetic construct
  misc_feature 1..20: note = source = /note="Description of Artificial Sequence: Synthetic oligonucleotide"
  source 1..20: mol_type = other RNA
tcactgcaacctccgcctcc

SEQ ID NO: 5010 - RNA, 20 nt, synthetic construct
  misc_feature 1..20: note = source = /note="Description of Artificial Sequence: Synthetic oligonucleotide"
  source 1..20: mol_type = other RNA
gcctcagcctcccgagtagc

SEQ ID NO: 5011 - RNA, 20 nt, synthetic construct
  misc_feature 1..20: note = source = /note="Description of Artificial Sequence: Synthetic oligonucleotide"
  source 1..20: mol_type = other RNA
cctcagcctcccgagtagct

SEQ ID NO: 5012 - RNA, 20 nt, synthetic construct
  misc_feature 1..20: note = source = /note="Description of Artificial Sequence: Synthetic oligonucleotide"
  source 1..20: mol_type = other RNA
tcccgagtagctgggattat

SEQ ID NO: 5013 - RNA, 20 nt, synthetic construct
  misc_feature 1..20: note = source = /note="Description of Artificial Sequence: Synthetic oligonucleotide"
  source 1..20: mol_type = other RNA
taggcatgcaccaccactcc

SEQ ID NO: 5014 - RNA, 20 nt, synthetic construct
  misc_feature 1..20: note = source = /note="Description of Artificial Sequence: Synthetic oligonucleotide"
  source 1..20: mol_type = other RNA
ttttctatttttagtagaga

SEQ ID NO: 5015 - RNA, 20 nt, synthetic construct
  misc_feature 1..20: note = source = /note="Description of Artificial Sequence: Synthetic oligonucleotide"
  source 1..20: mol_type = other RNA
gagacggagtttctccatgt

SEQ ID NO: 5016 - RNA, 20 nt, synthetic construct
  misc_feature 1..20: note = source = /note="Description of Artificial Sequence: Synthetic oligonucleotide"
  source 1..20: mol_type = other RNA
ggagtttctccatgttggtc

SEQ ID NO: 5017 - RNA, 20 nt, synthetic construct
  misc_feature 1..20: note = source = /note="Description of Artificial Sequence: Synthetic oligonucleotide"
  source 1..20: mol_type = other RNA
tttctccatgttggtcaggc

SEQ ID NO: 5018 - RNA, 20 nt, synthetic construct
  misc_feature 1..20: note = source = /note="Description of Artificial Sequence: Synthetic oligonucleotide"
  source 1..20: mol_type = other RNA
ggtctcaaactcccaacctc

SEQ ID NO: 5019 - RNA, 20 nt, synthetic construct
  misc_feature 1..20: note = source = /note="Description of Artificial Sequence: Synthetic oligonucleotide"
  source 1..20: mol_type = other RNA
cttcagcctcctaaagtgct

SEQ ID NO: 5020 - RNA, 20 nt, synthetic construct
  misc_feature 1..20: note = source = /note="Description of Artificial Sequence: Synthetic oligonucleotide"
  source 1..20: mol_type = other RNA
tcctaaagtgctaggattac

SEQ ID NO: 5021 - RNA, 20 nt, synthetic construct
  misc_feature 1..20: note = source = /note="Description of Artificial Sequence: Synthetic oligonucleotide"
  source 1..20: mol_type = other RNA
agccgaaaacattatcttaa

SEQ ID NO: 5022 - RNA, 20 nt, synthetic construct
  misc_feature 1..20: note = source = /note="Description of Artificial Sequence: Synthetic oligonucleotide"
  source 1..20: mol_type = other RNA
aaaatactgcttaaaagatc

SEQ ID NO: 5023 - RNA, 20 nt, synthetic construct
  misc_feature 1..20: note = source = /note="Description of Artificial Sequence: Synthetic oligonucleotide"
  source 1..20: mol_type = other RNA
tatttctcttttacttgtct

SEQ ID NO: 5024 - RNA, 20 nt, synthetic construct
  misc_feature 1..20: note = source = /note="Description of Artificial Sequence: Synthetic oligonucleotide"
  source 1..20: mol_type = other RNA
tctagttcagatttatagtt

SEQ ID NO: 5025 - RNA, 20 nt, synthetic construct
  misc_feature 1..20: note = source = /note="Description of Artificial Sequence: Synthetic oligonucleotide"
  source 1..20: mol_type = other RNA
tgttagtgcttcagcccatc

SEQ ID NO: 5026 - RNA, 20 nt, synthetic construct
  misc_feature 1..20: note = source = /note="Description of Artificial Sequence: Synthetic oligonucleotide"
  source 1..20: mol_type = other RNA
agtgcttcagcccatctggt

SEQ ID NO: 5027 - RNA, 20 nt, synthetic construct
  misc_feature 1..20: note = source = /note="Description of Artificial Sequence: Synthetic oligonucleotide"
  source 1..20: mol_type = other RNA
gtgcttcagcccatctggtt

SEQ ID NO: 5028 - RNA, 20 nt, synthetic construct
  misc_feature 1..20: note = source = /note="Description of Artificial Sequence: Synthetic oligonucleotide"
  source 1..20: mol_type = other RNA
tgcttcagcccatctggttg

SEQ ID NO: 5029 - RNA, 20 nt, synthetic construct
  misc_feature 1..20: note = source = /note="Description of Artificial Sequence: Synthetic oligonucleotide"
  source 1..20: mol_type = other RNA
ggggaacagctctatcccac

SEQ ID NO: 5030 - RNA, 20 nt, synthetic construct
  misc_feature 1..20: note = source = /note="Description of Artificial Sequence: Synthetic oligonucleotide"
  source 1..20: mol_type = other RNA
gggaacagctctatcccact

SEQ ID NO: 5031 - RNA, 20 nt, synthetic construct
  misc_feature 1..20: note = source = /note="Description of Artificial Sequence: Synthetic oligonucleotide"
  source 1..20: mol_type = other RNA
ctttcctcatgagtgacgcc

SEQ ID NO: 5032 - RNA, 20 nt, synthetic construct
  misc_feature 1..20: note = source = /note="Description of Artificial Sequence: Synthetic oligonucleotide"
  source 1..20: mol_type = other RNA
tttcctcatgagtgacgcca

SEQ ID NO: 5033 - RNA, 20 nt, synthetic construct
  misc_feature 1..20: note = source = /note="Description of Artificial Sequence: Synthetic oligonucleotide"
  source 1..20: mol_type = other RNA
ttccccagcttcgctgcctt

SEQ ID NO: 5034 - RNA, 20 nt, synthetic construct
  misc_feature 1..20: note = source = /note="Description of Artificial Sequence: Synthetic oligonucleotide"
  source 1..20: mol_type = other RNA
tcgcctttagtccttgatgc

SEQ ID NO: 5035 - RNA, 20 nt, synthetic construct
  misc_feature 1..20: note = source = /note="Description of Artificial Sequence: Synthetic oligonucleotide"
  source 1..20: mol_type = other RNA
cgcctttagtccttgatgct

SEQ ID NO: 5036 - RNA, 20 nt, synthetic construct
  misc_feature 1..20: note = source = /note="Description of Artificial Sequence: Synthetic oligonucleotide"
  source 1..20: mol_type = other RNA
gcctttagtccttgatgctg

SEQ ID NO: 5037 - RNA, 20 nt, synthetic construct
  misc_feature 1..20: note = source = /note="Description of Artificial Sequence: Synthetic oligonucleotide"
  source 1..20: mol_type = other RNA
ccttgatgctggggaccttt

SEQ ID NO: 5038 - RNA, 20 nt, synthetic construct
  misc_feature 1..20: note = source = /note="Description of Artificial Sequence: Synthetic oligonucleotide"
  source 1..20: mol_type = other RNA
gatgctggggaccttttggt

SEQ ID NO: 5039 - RNA, 20 nt, synthetic construct
  misc_feature 1..20: note = source = /note="Description of Artificial Sequence: Synthetic oligonucleotide"
  source 1..20: mol_type = other RNA
atgctggggaccttttggtt

SEQ ID NO: 5040 - RNA, 20 nt, synthetic construct
  misc_feature 1..20: note = source = /note="Description of Artificial Sequence: Synthetic oligonucleotide"
  source 1..20: mol_type = other RNA
gaagacagcttccttatgtc

SEQ ID NO: 5041 - RNA, 20 nt, synthetic construct
  misc_feature 1..20: note = source = /note="Description of Artificial Sequence: Synthetic oligonucleotide"
  source 1..20: mol_type = other RNA
aagacagcttccttatgtca

SEQ ID NO: 5042 - RNA, 20 nt, synthetic construct
  misc_feature 1..20: note = source = /note="Description of Artificial Sequence: Synthetic oligonucleotide"
  source 1..20: mol_type = other RNA
tcagggtgagcctgctacac

SEQ ID NO: 5043 - RNA, 20 nt, synthetic construct
  misc_feature 1..20: note = source = /note="Description of Artificial Sequence: Synthetic oligonucleotide"
  source 1..20: mol_type = other RNA
gtttctttgtctccctcaaa

SEQ ID NO: 5044 - RNA, 20 nt, synthetic construct
  misc_feature 1..20: note = source = /note="Description of Artificial Sequence: Synthetic oligonucleotide"
  source 1..20: mol_type = other RNA
tccctcaaatggtacaaacg

SEQ ID NO: 5045 - RNA, 20 nt, synthetic construct
  misc_feature 1..20: note = source = /note="Description of Artificial Sequence: Synthetic oligonucleotide"
  source 1..20: mol_type = other RNA
ctcaaatggtacaaacgtgg

SEQ ID NO: 5046 - RNA, 20 nt, synthetic construct
  misc_feature 1..20: note = source = /note="Description of Artificial Sequence: Synthetic oligonucleotide"
  source 1..20: mol_type = other RNA
tcaaatggtacaaacgtgga

SEQ ID NO: 5047 - RNA, 20 nt, synthetic construct
  misc_feature 1..20: note = source = /note="Description of Artificial Sequence: Synthetic oligonucleotide"
  source 1..20: mol_type = other RNA
gccctccaaataagagatga

SEQ ID NO: 5048 - RNA, 20 nt, synthetic construct
  misc_feature 1..20: note = source = /note="Description of Artificial Sequence: Synthetic oligonucleotide"
  source 1..20: mol_type = other RNA
tccacaactgactttaaaag

SEQ ID NO: 5049 - RNA, 20 nt, synthetic construct
  misc_feature 1..20: note = source = /note="Description of Artificial Sequence: Synthetic oligonucleotide"
  source 1..20: mol_type = other RNA
ccacaactgactttaaaaga

SEQ ID NO: 5050 - RNA, 20 nt, synthetic construct
  misc_feature 1..20: note = source = /note="Description of Artificial Sequence: Synthetic oligonucleotide"
  source 1..20: mol_type = other RNA
actgactttaaaagagggac

SEQ ID NO: 5051 - RNA, 20 nt, synthetic construct
  misc_feature 1..20: note = source = /note="Description of Artificial Sequence: Synthetic oligonucleotide"
  source 1..20: mol_type = other RNA
ctgactttaaaagagggact

SEQ ID NO: 5052 - RNA, 20 nt, synthetic construct
  misc_feature 1..20: note = source = /note="Description of Artificial Sequence: Synthetic oligonucleotide"
  source 1..20: mol_type = other RNA
tttaaaagagggactgggat

SEQ ID NO: 5053 - RNA, 20 nt, synthetic construct
  misc_feature 1..20: note = source = /note="Description of Artificial Sequence: Synthetic oligonucleotide"
  source 1..20: mol_type = other RNA
ttaaaagagggactgggatt

SEQ ID NO: 5054 - RNA, 20 nt, synthetic construct
  misc_feature 1..20: note = source = /note="Description of Artificial Sequence: Synthetic oligonucleotide"
  source 1..20: mol_type = other RNA
cttagtgatgacttttaatg

SEQ ID NO: 5055 - RNA, 20 nt, synthetic construct
  misc_feature 1..20: note = source = /note="Description of Artificial Sequence: Synthetic oligonucleotide"
  source 1..20: mol_type = other RNA
taaactctctgcctctcagc

SEQ ID NO: 5056 - RNA, 20 nt, synthetic construct
  misc_feature 1..20: note = source = /note="Description of Artificial Sequence: Synthetic oligonucleotide"
  source 1..20: mol_type = other RNA
tctcagctggcactattcca

SEQ ID NO: 5057 - RNA, 20 nt, synthetic construct
  misc_feature 1..20: note = source = /note="Description of Artificial Sequence: Synthetic oligonucleotide"
  source 1..20: mol_type = other RNA
ccatggtattttagtgctaa

SEQ ID NO: 5058 - RNA, 20 nt, synthetic construct
  misc_feature 1..20: note = source = /note="Description of Artificial Sequence: Synthetic oligonucleotide"
  source 1..20: mol_type = other RNA
catggtattttagtgctaat

SEQ ID NO: 5059 - RNA, 20 nt, synthetic construct
  misc_feature 1..20: note = source = /note="Description of Artificial Sequence: Synthetic oligonucleotide"
  source 1..20: mol_type = other RNA
atggtattttagtgctaatg

SEQ ID NO: 5060 - RNA, 20 nt, synthetic construct
  misc_feature 1..20: note = source = /note="Description of Artificial Sequence: Synthetic oligonucleotide"
  source 1..20: mol_type = other RNA
tggtattttagtgctaatgg

SEQ ID NO: 5061 - RNA, 20 nt, synthetic construct
  misc_feature 1..20: note = source = /note="Description of Artificial Sequence: Synthetic oligonucleotide"
  source 1..20: mol_type = other RNA
tgactgtttaaatcatttac

SEQ ID NO: 5062 - RNA, 20 nt, synthetic construct
  misc_feature 1..20: note = source = /note="Description of Artificial Sequence: Synthetic oligonucleotide"
  source 1..20: mol_type = other RNA
ttaaatcatttactggaaag

SEQ ID NO: 5063 - RNA, 20 nt, synthetic construct
  misc_feature 1..20: note = source = /note="Description of Artificial Sequence: Synthetic oligonucleotide"
  source 1..20: mol_type = other RNA
taaatcatttactggaaaga

SEQ ID NO: 5064 - RNA, 20 nt, synthetic construct
  misc_feature 1..20: note = source = /note="Description of Artificial Sequence: Synthetic oligonucleotide"
  source 1..20: mol_type = other RNA
gattttgttcatgaacatga

SEQ ID NO: 5065 - RNA, 20 nt, synthetic construct
  misc_feature 1..20: note = source = /note="Description of Artificial Sequence: Synthetic oligonucleotide"
  source 1..20: mol_type = other RNA
ttcttaaatgcctttaatat

SEQ ID NO: 5066 - RNA, 20 nt, synthetic construct
  misc_feature 1..20: note = source = /note="Description of Artificial Sequence: Synthetic oligonucleotide"
  source 1..20: mol_type = other RNA
aatattggatactgctttca

SEQ ID NO: 5067 - RNA, 20 nt, synthetic construct
  misc_feature 1..20: note = source = /note="Description of Artificial Sequence: Synthetic oligonucleotide"
  source 1..20: mol_type = other RNA
ggaaatttaaaatagcaagc

SEQ ID NO: 5068 - RNA, 20 nt, synthetic construct
  misc_feature 1..20: note = source = /note="Description of Artificial Sequence: Synthetic oligonucleotide"
  source 1..20: mol_type = other RNA
caagtcatataaaacaagtt

SEQ ID NO: 5069 - RNA, 20 nt, synthetic construct
  misc_feature 1..20: note = source = /note="Description of Artificial Sequence: Synthetic oligonucleotide"
  source 1..20: mol_type = other RNA
agattccaaacattaatata

SEQ ID NO: 5070 - RNA, 20 nt, synthetic construct
  misc_feature 1..20: note = source = /note="Description of Artificial Sequence: Synthetic oligonucleotide"
  source 1..20: mol_type = other RNA
tacataaattttactagaag

SEQ ID NO: 5071 - RNA, 20 nt, synthetic construct
  misc_feature 1..20: note = source = /note="Description of Artificial Sequence: Synthetic oligonucleotide"
  source 1..20: mol_type = other RNA
tcaaaaagatctcaaatctt

SEQ ID NO: 5072 - RNA, 20 nt, synthetic construct
  misc_feature 1..20: note = source = /note="Description of Artificial Sequence: Synthetic oligonucleotide"
  source 1..20: mol_type = other RNA
caaaaagatctcaaatctta

SEQ ID NO: 5073 - RNA, 20 nt, synthetic construct
  misc_feature 1..20: note = source = /note="Description of Artificial Sequence: Synthetic oligonucleotide"
  source 1..20: mol_type = other RNA
ggactaatattgtaagtata

SEQ ID NO: 5074 - RNA, 20 nt, synthetic construct
  misc_feature 1..20: note = source = /note="Description of Artificial Sequence: Synthetic oligonucleotide"
  source 1..20: mol_type = other RNA
gactaatattgtaagtatac

SEQ ID NO: 5075 - RNA, 20 nt, synthetic construct
  misc_feature 1..20: note = source = /note="Description of Artificial Sequence: Synthetic oligonucleotide"
  source 1..20: mol_type = other RNA
actaatattgtaagtatacg

SEQ ID NO: 5076 - RNA, 20 nt, synthetic construct
  misc_feature 1..20: note = source = /note="Description of Artificial Sequence: Synthetic oligonucleotide"
  source 1..20: mol_type = other RNA
tatcttgtgagtttttagtt

SEQ ID NO: 5077 - RNA, 20 nt, synthetic construct
  misc_feature 1..20: note = source = /note="Description of Artificial Sequence: Synthetic oligonucleotide"
  source 1..20: mol_type = other RNA
actctccttttgaagtacaa

SEQ ID NO: 5078 - RNA, 20 nt, synthetic construct
  misc_feature 1..20: note = source = /note="Description of Artificial Sequence: Synthetic oligonucleotide"
  source 1..20: mol_type = other RNA
ctctccttttgaagtacaaa

SEQ ID NO: 5079 - RNA, 20 nt, synthetic construct
  misc_feature 1..20: note = source = /note="Description of Artificial Sequence: Synthetic oligonucleotide"
  source 1..20: mol_type = other RNA
ctaaagtgaataactcaaac

SEQ ID NO: 5080 - RNA, 20 nt, synthetic construct
  misc_feature 1..20: note = source = /note="Description of Artificial Sequence: Synthetic oligonucleotide"
  source 1..20: mol_type = other RNA
gttttattgcatagtttctt

SEQ ID NO: 5081 - RNA, 20 nt, synthetic construct
  misc_feature 1..20: note = source = /note="Description of Artificial Sequence: Synthetic oligonucleotide"
  source 1..20: mol_type = other RNA
ttttattgcatagtttcttt

SEQ ID NO: 5082 - RNA, 20 nt, synthetic construct
  misc_feature 1..20: note = source = /note="Description of Artificial Sequence: Synthetic oligonucleotide"
  source 1..20: mol_type = other RNA
ttctttgggatatacattga

SEQ ID NO: 5083 - RNA, 20 nt, synthetic construct
  misc_feature 1..20: note = source = /note="Description of Artificial Sequence: Synthetic oligonucleotide"
  source 1..20: mol_type = other RNA
ggatatacattgaaggagaa

SEQ ID NO: 5084 - RNA, 20 nt, synthetic construct
  misc_feature 1..20: note = source = /note="Description of Artificial Sequence: Synthetic oligonucleotide"
  source 1..20: mol_type = other RNA
tatacattgaaggagaaagg

SEQ ID NO: 5085 - RNA, 20 nt, synthetic construct
  misc_feature 1..20: note = source = /note="Description of Artificial Sequence: Synthetic oligonucleotide"
  source 1..20: mol_type = other RNA
acattgaaggagaaaggagg

SEQ ID NO: 5086 - RNA, 20 nt, synthetic construct
  misc_feature 1..20: note = source = /note="Description of Artificial Sequence: Synthetic oligonucleotide"
  source 1..20: mol_type = other RNA
cattgaaggagaaaggagga

SEQ ID NO: 5087 - RNA, 20 nt, synthetic construct
  misc_feature 1..20: note = source = /note="Description of Artificial Sequence: Synthetic oligonucleotide"
  source 1..20: mol_type = other RNA
agggagttttaaaagacaag

SEQ ID NO: 5088 - RNA, 20 nt, synthetic construct
  misc_feature 1..20: note = source = /note="Description of Artificial Sequence: Synthetic oligonucleotide"
  source 1..20: mol_type = other RNA
aaagccctttctgcttgttt

SEQ ID NO: 5089 - RNA, 20 nt, synthetic construct
  misc_feature 1..20: note = source = /note="Description of Artificial Sequence: Synthetic oligonucleotide"
  source 1..20: mol_type = other RNA
ctttctgcttgttttggcta

SEQ ID NO: 5090 - RNA, 20 nt, synthetic construct
  misc_feature 1..20: note = source = /note="Description of Artificial Sequence: Synthetic oligonucleotide"
  source 1..20: mol_type = other RNA
catttcagtgtctgtattta

SEQ ID NO: 5091 - RNA, 20 nt, synthetic construct
  misc_feature 1..20: note = source = /note="Description of Artificial Sequence: Synthetic oligonucleotide"
  source 1..20: mol_type = other RNA
atttcagtgtctgtatttaa

SEQ ID NO: 5092 - RNA, 20 nt, synthetic construct
  misc_feature 1..20: note = source = /note="Description of Artificial Sequence: Synthetic oligonucleotide"
  source 1..20: mol_type = other RNA
tgtatttaagggatcataaa

SEQ ID NO: 5093 - RNA, 20 nt, synthetic construct
  misc_feature 1..20: note = source = /note="Description of Artificial Sequence: Synthetic oligonucleotide"
  source 1..20: mol_type = other RNA
taagggatcataaaaggaac

SEQ ID NO: 5094 - RNA, 20 nt, synthetic construct
  misc_feature 1..20: note = source = /note="Description of Artificial Sequence: Synthetic oligonucleotide"
  source 1..20: mol_type = other RNA
ataaaaggaactggaaagac

SEQ ID NO: 5095 - RNA, 20 nt, synthetic construct
  misc_feature 1..20: note = source = /note="Description of Artificial Sequence: Synthetic oligonucleotide"
  source 1..20: mol_type = other RNA
actggaaagactggtcacaa

SEQ ID NO: 5096 - RNA, 20 nt, synthetic construct
  misc_feature 1..20: note = source = /note="Description of Artificial Sequence: Synthetic oligonucleotide"
  source 1..20: mol_type = other RNA
gctctgtacctgtatgattt

SEQ ID NO: 5097 - RNA, 20 nt, synthetic construct
  misc_feature 1..20: note = source = /note="Description of Artificial Sequence: Synthetic oligonucleotide"
  source 1..20: mol_type = other RNA
cttgttaacctatactgctg

SEQ ID NO: 5098 - RNA, 20 nt, synthetic construct
  misc_feature 1..20: note = source = /note="Description of Artificial Sequence: Synthetic oligonucleotide"
  source 1..20: mol_type = other RNA
aagtcattcattatgcagtt

SEQ ID NO: 5099 - RNA, 20 nt, synthetic construct
  misc_feature 1..20: note = source = /note="Description of Artificial Sequence: Synthetic oligonucleotide"
  source 1..20: mol_type = other RNA
caaataaagttcacagctct

SEQ ID NO: 5100 - RNA, 20 nt, synthetic construct
  misc_feature 1..20: note = source = /note="Description of Artificial Sequence: Synthetic oligonucleotide"
  source 1..20: mol_type = other RNA
aagaagatagaatcaatact

SEQ ID NO: 5101 - RNA, 20 nt, synthetic construct
  misc_feature 1..20: note = source = /note="Description of Artificial Sequence: Synthetic oligonucleotide"
  source 1..20: mol_type = other RNA
atcaatacttggtgattgat

SEQ ID NO: 5102 - RNA, 20 nt, synthetic construct
  misc_feature 1..20: note = source = /note="Description of Artificial Sequence: Synthetic oligonucleotide"
  source 1..20: mol_type = other RNA
ttgataggttattttttaaa

SEQ ID NO: 5103 - RNA, 20 nt, synthetic construct
  misc_feature 1..20: note = source = /note="Description of Artificial Sequence: Synthetic oligonucleotide"
  source 1..20: mol_type = other RNA
tgataggttattttttaaaa

SEQ ID NO: 5104 - RNA, 20 nt, synthetic construct
  misc_feature 1..20: note = source = /note="Description of Artificial Sequence: Synthetic oligonucleotide"
  source 1..20: mol_type = other RNA
aagaaagaattaaacatcca

SEQ ID NO: 5105 - RNA, 20 nt, synthetic construct
  misc_feature 1..20: note = source = /note="Description of Artificial Sequence: Synthetic oligonucleotide"
  source 1..20: mol_type = other RNA
atggtttcttcttaagtaac

SEQ ID NO: 5106 - RNA, 20 nt, synthetic construct
  misc_feature 1..20: note = source = /note="Description of Artificial Sequence: Synthetic oligonucleotide"
  source 1..20: mol_type = other RNA
tggtttcttcttaagtaact

SEQ ID NO: 5107 - RNA, 20 nt, synthetic construct
  misc_feature 1..20: note = source = /note="Description of Artificial Sequence: Synthetic oligonucleotide"
  source 1..20: mol_type = other RNA
ggtttcttcttaagtaactg

SEQ ID NO: 5108 - RNA, 20 nt, synthetic construct
  misc_feature 1..20: note = source = /note="Description of Artificial Sequence: Synthetic oligonucleotide"
  source 1..20: mol_type = other RNA
gtttcttcttaagtaactgg

SEQ ID NO: 5109 - RNA, 20 nt, synthetic construct
  misc_feature 1..20: note = source = /note="Description of Artificial Sequence: Synthetic oligonucleotide"
  source 1..20: mol_type = other RNA
tttcttcttaagtaactggg

SEQ ID NO: 5110 - RNA, 20 nt, synthetic construct
  misc_feature 1..20: note = source = /note="Description of Artificial Sequence: Synthetic oligonucleotide"
  source 1..20: mol_type = other RNA
gatagtatccctcacaccaa

SEQ ID NO: 5111 - RNA, 20 nt, synthetic construct
  misc_feature 1..20: note = source = /note="Description of Artificial Sequence: Synthetic oligonucleotide"
  source 1..20: mol_type = other RNA
atagtatccctcacaccaat

SEQ ID NO: 5112 - RNA, 20 nt, synthetic construct
  misc_feature 1..20: note = source = /note="Description of Artificial Sequence: Synthetic oligonucleotide"
  source 1..20: mol_type = other RNA
tagtatccctcacaccaatg

SEQ ID NO: 5113 - RNA, 20 nt, synthetic construct
  misc_feature 1..20: note = source = /note="Description of Artificial Sequence: Synthetic oligonucleotide"
  source 1..20: mol_type = other RNA
caatggggagtatagatgac

SEQ ID NO: 5114 - RNA, 20 nt, synthetic construct
  misc_feature 1..20: note = source = /note="Description of Artificial Sequence: Synthetic oligonucleotide"
  source 1..20: mol_type = other RNA
gggagtatagatgacaggtt

SEQ ID NO: 5115 - RNA, 20 nt, synthetic construct
  misc_feature 1..20: note = source = /note="Description of Artificial Sequence: Synthetic oligonucleotide"
  source 1..20: mol_type = other RNA
aaagacagtgaattccattt

SEQ ID NO: 5116 - RNA, 20 nt, synthetic construct
  misc_feature 1..20: note = source = /note="Description of Artificial Sequence: Synthetic oligonucleotide"
  source 1..20: mol_type = other RNA
agttgaatttgaagtgccta

SEQ ID NO: 5117 - RNA, 20 nt, synthetic construct
  misc_feature 1..20: note = source = /note="Description of Artificial Sequence: Synthetic oligonucleotide"
  source 1..20: mol_type = other RNA
gttgaatttgaagtgcctat

SEQ ID NO: 5118 - RNA, 20 nt, synthetic construct
  misc_feature 1..20: note = source = /note="Description of Artificial Sequence: Synthetic oligonucleotide"
  source 1..20: mol_type = other RNA
gaagtgcctatgggacatac

SEQ ID NO: 5119 - RNA, 20 nt, synthetic construct
  misc_feature 1..20: note = source = /note="Description of Artificial Sequence: Synthetic oligonucleotide"
  source 1..20: mol_type = other RNA
acatacaggtacagatgact

SEQ ID NO: 5120 - RNA, 20 nt, synthetic construct
  misc_feature 1..20: note = source = /note="Description of Artificial Sequence: Synthetic oligonucleotide"
  source 1..20: mol_type = other RNA
taaattgctacttgagttca

SEQ ID NO: 5121 - RNA, 20 nt, synthetic construct
  misc_feature 1..20: note = source = /note="Description of Artificial Sequence: Synthetic oligonucleotide"
  source 1..20: mol_type = other RNA
aaattgctacttgagttcat

SEQ ID NO: 5122 - RNA, 20 nt, synthetic construct
  misc_feature 1..20: note = source = /note="Description of Artificial Sequence: Synthetic oligonucleotide"
  source 1..20: mol_type = other RNA
tgagttcatgggaataaaat

SEQ ID NO: 5123 - RNA, 20 nt, synthetic construct
  misc_feature 1..20: note = source = /note="Description of Artificial Sequence: Synthetic oligonucleotide"
  source 1..20: mol_type = other RNA
aaaataggtcattctgcaaa

SEQ ID NO: 5124 - RNA, 20 nt, synthetic construct
  misc_feature 1..20: note = source = /note="Description of Artificial Sequence: Synthetic oligonucleotide"
  source 1..20: mol_type = other RNA
tggttatctcaatatcttcc

SEQ ID NO: 5125 - RNA, 20 nt, synthetic construct
  misc_feature 1..20: note = source = /note="Description of Artificial Sequence: Synthetic oligonucleotide"
  source 1..20: mol_type = other RNA
atatcttcctggccatctct

SEQ ID NO: 5126 - RNA, 20 nt, synthetic construct
  misc_feature 1..20: note = source = /note="Description of Artificial Sequence: Synthetic oligonucleotide"
  source 1..20: mol_type = other RNA
tatcttcctggccatctctt

SEQ ID NO: 5127 - RNA, 20 nt, synthetic construct
  misc_feature 1..20: note = source = /note="Description of Artificial Sequence: Synthetic oligonucleotide"
  source 1..20: mol_type = other RNA
tctaaattctcatgttttta

SEQ ID NO: 5128 - RNA, 20 nt, synthetic construct
  misc_feature 1..20: note = source = /note="Description of Artificial Sequence: Synthetic oligonucleotide"
  source 1..20: mol_type = other RNA
gtttttaaggctctcatctt

SEQ ID NO: 5129 - RNA, 20 nt, synthetic construct
  misc_feature 1..20: note = source = /note="Description of Artificial Sequence: Synthetic oligonucleotide"
  source 1..20: mol_type = other RNA
catcttaggccaacttatct

SEQ ID NO: 5130 - RNA, 20 nt, synthetic construct
  misc_feature 1..20: note = source = /note="Description of Artificial Sequence: Synthetic oligonucleotide"
  source 1..20: mol_type = other RNA
atcttaggccaacttatctt

SEQ ID NO: 5131 - RNA, 20 nt, synthetic construct
  misc_feature 1..20: note = source = /note="Description of Artificial Sequence: Synthetic oligonucleotide"
  source 1..20: mol_type = other RNA
tctctaaatttgtgctttta

SEQ ID NO: 5132 - RNA, 20 nt, synthetic construct
  misc_feature 1..20: note = source = /note="Description of Artificial Sequence: Synthetic oligonucleotide"
  source 1..20: mol_type = other RNA
ttaaggccccattctcaagc

SEQ ID NO: 5133 - RNA, 20 nt, synthetic construct
  misc_feature 1..20: note = source = /note="Description of Artificial Sequence: Synthetic oligonucleotide"
  source 1..20: mol_type = other RNA
tcaagctggcttctctgttt

SEQ ID NO: 5134 - RNA, 20 nt, synthetic construct
  misc_feature 1..20: note = source = /note="Description of Artificial Sequence: Synthetic oligonucleotide"
  source 1..20: mol_type = other RNA
agctggcttctctgttttgg

SEQ ID NO: 5135 - RNA, 20 nt, synthetic construct
  misc_feature 1..20: note = source = /note="Description of Artificial Sequence: Synthetic oligonucleotide"
  source 1..20: mol_type = other RNA
gctggcttctctgttttggt

SEQ ID NO: 5136 - RNA, 20 nt, synthetic construct
  misc_feature 1..20: note = source = /note="Description of Artificial Sequence: Synthetic oligonucleotide"
  source 1..20: mol_type = other RNA
ttctctgttttggtgggaac

SEQ ID NO: 5137 - RNA, 20 nt, synthetic construct
  misc_feature 1..20: note = source = /note="Description of Artificial Sequence: Synthetic oligonucleotide"
  source 1..20: mol_type = other RNA
tcatttgtaaacaacccaaa

SEQ ID NO: 5138 - RNA, 20 nt, synthetic construct
  misc_feature 1..20: note = source = /note="Description of Artificial Sequence: Synthetic oligonucleotide"
  source 1..20: mol_type = other RNA
ccaaatggctagcattgagc

SEQ ID NO: 5139 - RNA, 20 nt, synthetic construct
  misc_feature 1..20: note = source = /note="Description of Artificial Sequence: Synthetic oligonucleotide"
  source 1..20: mol_type = other RNA
ttacattttgagttatctga

SEQ ID NO: 5140 - RNA, 20 nt, synthetic construct
  misc_feature 1..20: note = source = /note="Description of Artificial Sequence: Synthetic oligonucleotide"
  source 1..20: mol_type = other RNA
aaggatcaatatctcaaact

SEQ ID NO: 5141 - RNA, 20 nt, synthetic construct
  misc_feature 1..20: note = source = /note="Description of Artificial Sequence: Synthetic oligonucleotide"
  source 1..20: mol_type = other RNA
ttttcttgcctttaagtata

SEQ ID NO: 5142 - RNA, 20 nt, synthetic construct
  misc_feature 1..20: note = source = /note="Description of Artificial Sequence: Synthetic oligonucleotide"
  source 1..20: mol_type = other RNA
tttcttgcctttaagtataa

SEQ ID NO: 5143 - RNA, 20 nt, synthetic construct
  misc_feature 1..20: note = source = /note="Description of Artificial Sequence: Synthetic oligonucleotide"
  source 1..20: mol_type = other RNA
acaagttaaaaaatttaatt

SEQ ID NO: 5144 - RNA, 20 nt, synthetic construct
  misc_feature 1..20: note = source = /note="Description of Artificial Sequence: Synthetic oligonucleotide"
  source 1..20: mol_type = other RNA
agcatgaagaagagtaaaat

SEQ ID NO: 5145 - RNA, 20 nt, synthetic construct
  misc_feature 1..20: note = source = /note="Description of Artificial Sequence: Synthetic oligonucleotide"
  source 1..20: mol_type = other RNA
gaagaagagtaaaataggag

SEQ ID NO: 5146 - RNA, 20 nt, synthetic construct
  misc_feature 1..20: note = source = /note="Description of Artificial Sequence: Synthetic oligonucleotide"
  source 1..20: mol_type = other RNA
agtaaaataggagtggataa

SEQ ID NO: 5147 - RNA, 20 nt, synthetic construct
  misc_feature 1..20: note = source = /note="Description of Artificial Sequence: Synthetic oligonucleotide"
  source 1..20: mol_type = other RNA
aggagtggataaaggcacag

SEQ ID NO: 5148 - RNA, 20 nt, synthetic construct
  misc_feature 1..20: note = source = /note="Description of Artificial Sequence: Synthetic oligonucleotide"
  source 1..20: mol_type = other RNA
tccaattaatctcaaagttt

SEQ ID NO: 5149 - RNA, 20 nt, synthetic construct
  misc_feature 1..20: note = source = /note="Description of Artificial Sequence: Synthetic oligonucleotide"
  source 1..20: mol_type = other RNA
tgtcttcctgctttttgacg

SEQ ID NO: 5150 - RNA, 20 nt, synthetic construct
  misc_feature 1..20: note = source = /note="Description of Artificial Sequence: Synthetic oligonucleotide"
  source 1..20: mol_type = other RNA
tggtaacctgccataacaaa

SEQ ID NO: 5151 - RNA, 20 nt, synthetic construct
  misc_feature 1..20: note = source = /note="Description of Artificial Sequence: Synthetic oligonucleotide"
  source 1..20: mol_type = other RNA
ccataacaaaaggaaacagc

SEQ ID NO: 5152 - RNA, 20 nt, synthetic construct
  misc_feature 1..20: note = source = /note="Description of Artificial Sequence: Synthetic oligonucleotide"
  source 1..20: mol_type = other RNA
aaaggaaacagcaggaaact

SEQ ID NO: 5153 - RNA, 20 nt, synthetic construct
  misc_feature 1..20: note = source = /note="Description of Artificial Sequence: Synthetic oligonucleotide"
  source 1..20: mol_type = other RNA
aagtgttttagagtgaaaca

SEQ ID NO: 5154 - RNA, 20 nt, synthetic construct
  misc_feature 1..20: note = source = /note="Description of Artificial Sequence: Synthetic oligonucleotide"
  source 1..20: mol_type = other RNA
gaaacaaggataaagagaca

SEQ ID NO: 5155 - RNA, 20 nt, synthetic construct
  misc_feature 1..20: note = source = /note="Description of Artificial Sequence: Synthetic oligonucleotide"
  source 1..20: mol_type = other RNA
tattaaattttaacatctgc

SEQ ID NO: 5156 - RNA, 20 nt, synthetic construct
  misc_feature 1..20: note = source = /note="Description of Artificial Sequence: Synthetic oligonucleotide"
  source 1..20: mol_type = other RNA
catgccagtagaattaagtt

SEQ ID NO: 5157 - RNA, 20 nt, synthetic construct
  misc_feature 1..20: note = source = /note="Description of Artificial Sequence: Synthetic oligonucleotide"
  source 1..20: mol_type = other RNA
gaaatgaaatagatgcctca

SEQ ID NO: 5158 - RNA, 20 nt, synthetic construct
  misc_feature 1..20: note = source = /note="Description of Artificial Sequence: Synthetic oligonucleotide"
  source 1..20: mol_type = other RNA
gaaatagatgcctcaaggca

SEQ ID NO: 5159 - RNA, 20 nt, synthetic construct
  misc_feature 1..20: note = source = /note="Description of Artificial Sequence: Synthetic oligonucleotide"
  source 1..20: mol_type = other RNA
tatatatatatgtttgagcg

SEQ ID NO: 5160 - RNA, 20 nt, synthetic construct
  misc_feature 1..20: note = source = /note="Description of Artificial Sequence: Synthetic oligonucleotide"
  source 1..20: mol_type = other RNA
atatatatatgtttgagcga

SEQ ID NO: 5161 - RNA, 20 nt, synthetic construct
  misc_feature 1..20: note = source = /note="Description of Artificial Sequence: Synthetic oligonucleotide"
  source 1..20: mol_type = other RNA
tatatatatgtttgagcgag

SEQ ID NO: 5162 - RNA, 20 nt, synthetic construct
  misc_feature 1..20: note = source = /note="Description of Artificial Sequence: Synthetic oligonucleotide"
  source 1..20: mol_type = other RNA
tctagcaaaactgaatacac

SEQ ID NO: 5163 - RNA, 20 nt, synthetic construct
  misc_feature 1..20: note = source = /note="Description of Artificial Sequence: Synthetic oligonucleotide"
  source 1..20: mol_type = other RNA
tttttttatccattcacttt

SEQ ID NO: 5164 - RNA, 20 nt, synthetic construct
  misc_feature 1..20: note = source = /note="Description of Artificial Sequence: Synthetic oligonucleotide"
  source 1..20: mol_type = other RNA
cagctgtgagttattcaacc

SEQ ID NO: 5165 - RNA, 20 nt, synthetic construct
  misc_feature 1..20: note = source = /note="Description of Artificial Sequence: Synthetic oligonucleotide"
  source 1..20: mol_type = other RNA
agtctgattaataacgttta

SEQ ID NO: 5166 - RNA, 20 nt, synthetic construct
  misc_feature 1..20: note = source = /note="Description of Artificial Sequence: Synthetic oligonucleotide"
  source 1..20: mol_type = other RNA
aaatgaatttccatccaaat

SEQ ID NO: 5167 - RNA, 20 nt, synthetic construct
  misc_feature 1..20: note = source = /note="Description of Artificial Sequence: Synthetic oligonucleotide"
  source 1..20: mol_type = other RNA
aatgaatttccatccaaata

SEQ ID NO: 5168 - RNA, 20 nt, synthetic construct
  misc_feature 1..20: note = source = /note="Description of Artificial Sequence: Synthetic oligonucleotide"
  source 1..20: mol_type = other RNA
gaatttccatccaaataggg

SEQ ID NO: 5169 - RNA, 20 nt, synthetic construct
  misc_feature 1..20: note = source = /note="Description of Artificial Sequence: Synthetic oligonucleotide"
  source 1..20: mol_type = other RNA
cagtgttgactgagatgctc

SEQ ID NO: 5170 - RNA, 20 nt, synthetic construct
  misc_feature 1..20: note = source = /note="Description of Artificial Sequence: Synthetic oligonucleotide"
  source 1..20: mol_type = other RNA
tgagatgctctggatgagcc

SEQ ID NO: 5171 - RNA, 20 nt, synthetic construct
  misc_feature 1..20: note = source = /note="Description of Artificial Sequence: Synthetic oligonucleotide"
  source 1..20: mol_type = other RNA
gactcagagctcaccaactt

SEQ ID NO: 5172 - RNA, 20 nt, synthetic construct
  misc_feature 1..20: note = source = /note="Description of Artificial Sequence: Synthetic oligonucleotide"
  source 1..20: mol_type = other RNA
tctttatgttaagtagtcag

SEQ ID NO: 5173 - RNA, 20 nt, synthetic construct
  misc_feature 1..20: note = source = /note="Description of Artificial Sequence: Synthetic oligonucleotide"
  source 1..20: mol_type = other RNA
ctttatgttaagtagtcagt

SEQ ID NO: 5174 - RNA, 20 nt, synthetic construct
  misc_feature 1..20: note = source = /note="Description of Artificial Sequence: Synthetic oligonucleotide"
  source 1..20: mol_type = other RNA
tttatgttaagtagtcagtg

SEQ ID NO: 5175 - RNA, 20 nt, synthetic construct
  misc_feature 1..20: note = source = /note="Description of Artificial Sequence: Synthetic oligonucleotide"
  source 1..20: mol_type = other RNA
tgttctacacctcttgatat

SEQ ID NO: 5176 - RNA, 20 nt, synthetic construct
  misc_feature 1..20: note = source = /note="Description of Artificial Sequence: Synthetic oligonucleotide"
  source 1..20: mol_type = other RNA
cacctcttgatataggtcag

SEQ ID NO: 5177 - RNA, 20 nt, synthetic construct
  misc_feature 1..20: note = source = /note="Description of Artificial Sequence: Synthetic oligonucleotide"
  source 1..20: mol_type = other RNA
aaacagtacatataccaagt

SEQ ID NO: 5178 - RNA, 20 nt, synthetic construct
  misc_feature 1..20: note = source = /note="Description of Artificial Sequence: Synthetic oligonucleotide"
  source 1..20: mol_type = other RNA
accaagttggtttgtcacaa

SEQ ID NO: 5179 - RNA, 20 nt, synthetic construct
  misc_feature 1..20: note = source = /note="Description of Artificial Sequence: Synthetic oligonucleotide"
  source 1..20: mol_type = other RNA
ccaagttggtttgtcacaat

SEQ ID NO: 5180 - RNA, 20 nt, synthetic construct
  misc_feature 1..20: note = source = /note="Description of Artificial Sequence: Synthetic oligonucleotide"
  source 1..20: mol_type = other RNA
tttgtgtgtatgtttctgaa

SEQ ID NO: 5181 - RNA, 20 nt, synthetic construct
  misc_feature 1..20: note = source = /note="Description of Artificial Sequence: Synthetic oligonucleotide"
  source 1..20: mol_type = other RNA
ttgtgtgtatgtttctgaat

SEQ ID NO: 5182 - RNA, 20 nt, synthetic construct
  misc_feature 1..20: note = source = /note="Description of Artificial Sequence: Synthetic oligonucleotide"
  source 1..20: mol_type = other RNA
tacataattttactcttcct

SEQ ID NO: 5183 - RNA, 20 nt, synthetic construct
  misc_feature 1..20: note = source = /note="Description of Artificial Sequence: Synthetic oligonucleotide"
  source 1..20: mol_type = other RNA
ggtgaagatgcttttataag

SEQ ID NO: 5184 - RNA, 20 nt, synthetic construct
  misc_feature 1..20: note = source = /note="Description of Artificial Sequence: Synthetic oligonucleotide"
  source 1..20: mol_type = other RNA
agaaaattaagaaatgttgt

SEQ ID NO: 5185 - RNA, 20 nt, synthetic construct
  misc_feature 1..20: note = source = /note="Description of Artificial Sequence: Synthetic oligonucleotide"
  source 1..20: mol_type = other RNA
tttaaacagaattagtatag

SEQ ID NO: 5186 - RNA, 20 nt, synthetic construct
  misc_feature 1..20: note = source = /note="Description of Artificial Sequence: Synthetic oligonucleotide"
  source 1..20: mol_type = other RNA
gaggtgtgaagatctactga

SEQ ID NO: 5187 - RNA, 20 nt, synthetic construct
  misc_feature 1..20: note = source = /note="Description of Artificial Sequence: Synthetic oligonucleotide"
  source 1..20: mol_type = other RNA
aggtgtgaagatctactgaa

SEQ ID NO: 5188 - RNA, 20 nt, synthetic construct
  misc_feature 1..20: note = source = /note="Description of Artificial Sequence: Synthetic oligonucleotide"
  source 1..20: mol_type = other RNA
tgaagggtgataagtaagtg

SEQ ID NO: 5189 - RNA, 20 nt, synthetic construct
  misc_feature 1..20: note = source = /note="Description of Artificial Sequence: Synthetic oligonucleotide"
  source 1..20: mol_type = other RNA
ataagtaagtgtggaagaga

SEQ ID NO: 5190 - RNA, 20 nt, synthetic construct
  misc_feature 1..20: note = source = /note="Description of Artificial Sequence: Synthetic oligonucleotide"
  source 1..20: mol_type = other RNA
gaagagatggtgttcagcat

SEQ ID NO: 5191 - RNA, 20 nt, synthetic construct
  misc_feature 1..20: note = source = /note="Description of Artificial Sequence: Synthetic oligonucleotide"
  source 1..20: mol_type = other RNA
aagagatggtgttcagcatt

SEQ ID NO: 5192 - RNA, 20 nt, synthetic construct
  misc_feature 1..20: note = source = /note="Description of Artificial Sequence: Synthetic oligonucleotide"
  source 1..20: mol_type = other RNA
cattgggcttcagtatgaat

SEQ ID NO: 5193 - RNA, 20 nt, synthetic construct
  misc_feature 1..20: note = source = /note="Description of Artificial Sequence: Synthetic oligonucleotide"
  source 1..20: mol_type = other RNA
gaataggtagaagatgagca

SEQ ID NO: 5194 - RNA, 20 nt, synthetic construct
  misc_feature 1..20: note = source = /note="Description of Artificial Sequence: Synthetic oligonucleotide"
  source 1..20: mol_type = other RNA
agacaagaagttcattcaat

SEQ ID NO: 5195 - RNA, 20 nt, synthetic construct
  misc_feature 1..20: note = source = /note="Description of Artificial Sequence: Synthetic oligonucleotide"
  source 1..20: mol_type = other RNA
gttcattcaataggctgttg

SEQ ID NO: 5196 - RNA, 20 nt, synthetic construct
  misc_feature 1..20: note = source = /note="Description of Artificial Sequence: Synthetic oligonucleotide"
  source 1..20: mol_type = other RNA
gcggttatccagcaatgaga

SEQ ID NO: 5197 - RNA, 20 nt, synthetic construct
  misc_feature 1..20: note = source = /note="Description of Artificial Sequence: Synthetic oligonucleotide"
  source 1..20: mol_type = other RNA
gatggtgacagcatgagcca

SEQ ID NO: 5198 - RNA, 20 nt, synthetic construct
  misc_feature 1..20: note = source = /note="Description of Artificial Sequence: Synthetic oligonucleotide"
  source 1..20: mol_type = other RNA
gagccatggtagtaaaagta

SEQ ID NO: 5199 - RNA, 20 nt, synthetic construct
  misc_feature 1..20: note = source = /note="Description of Artificial Sequence: Synthetic oligonucleotide"
  source 1..20: mol_type = other RNA
tggtagtaaaagtaaggaca

SEQ ID NO: 5200 - RNA, 20 nt, synthetic construct
  misc_feature 1..20: note = source = /note="Description of Artificial Sequence: Synthetic oligonucleotide"
  source 1..20: mol_type = other RNA
gtaaggacatggataatttg

SEQ ID NO: 5201 - RNA, 20 nt, synthetic construct
  misc_feature 1..20: note = source = /note="Description of Artificial Sequence: Synthetic oligonucleotide"
  source 1..20: mol_type = other RNA
taaggacatggataatttgt

SEQ ID NO: 5202 - RNA, 20 nt, synthetic construct
  misc_feature 1..20: note = source = /note="Description of Artificial Sequence: Synthetic oligonucleotide"
  source 1..20: mol_type = other RNA
aataagaacatagaaccgat

SEQ ID NO: 5203 - RNA, 20 nt, synthetic construct
  misc_feature 1..20: note = source = /note="Description of Artificial Sequence: Synthetic oligonucleotide"
  source 1..20: mol_type = other RNA
ccgataggttattttttaaa

SEQ ID NO: 5204 - RNA, 20 nt, synthetic construct
  misc_feature 1..20: note = source = /note="Description of Artificial Sequence: Synthetic oligonucleotide"
  source 1..20: mol_type = other RNA
cgataggttattttttaaac

SEQ ID NO: 5205 - RNA, 20 nt, synthetic construct
  misc_feature 1..20: note = source = /note="Description of Artificial Sequence: Synthetic oligonucleotide"
  source 1..20: mol_type = other RNA
aagaaagaattaaacatcca

SEQ ID NO: 5206 - RNA, 20 nt, synthetic construct
  misc_feature 1..20: note = source = /note="Description of Artificial Sequence: Synthetic oligonucleotide"
  source 1..20: mol_type = other RNA
tttcttcttaagtaactgcg

SEQ ID NO: 5207 - RNA, 20 nt, synthetic construct
  misc_feature 1..20: note = source = /note="Description of Artificial Sequence: Synthetic oligonucleotide"
  source 1..20: mol_type = other RNA
gatagtacccctcacactga

SEQ ID NO: 5208 - RNA, 20 nt, synthetic construct
  misc_feature 1..20: note = source = /note="Description of Artificial Sequence: Synthetic oligonucleotide"
  source 1..20: mol_type = other RNA
atagtacccctcacactgat

SEQ ID NO: 5209 - RNA, 20 nt, synthetic construct
  misc_feature 1..20: note = source = /note="Description of Artificial Sequence: Synthetic oligonucleotide"
  source 1..20: mol_type = other RNA
tagtacccctcacactgatg

SEQ ID NO: 5210 - RNA, 20 nt, synthetic construct
  misc_feature 1..20: note = source = /note="Description of Artificial Sequence: Synthetic oligonucleotide"
  source 1..20: mol_type = other RNA
tgatggggaatgtagatgac

SEQ ID NO: 5211 - RNA, 20 nt, synthetic construct
  misc_feature 1..20: note = source = /note="Description of Artificial Sequence: Synthetic oligonucleotide"
  source 1..20: mol_type = other RNA
gggaatgtagatgacaggtt

SEQ ID NO: 5212 - RNA, 20 nt, synthetic construct
  misc_feature 1..20: note = source = /note="Description of Artificial Sequence: Synthetic oligonucleotide"
  source 1..20: mol_type = other RNA
tgaaagaatgaattccattt

SEQ ID NO: 5213 - RNA, 20 nt, synthetic construct
  misc_feature 1..20: note = source = /note="Description of Artificial Sequence: Synthetic oligonucleotide"
  source 1..20: mol_type = other RNA
agtagagtttgaagtgccta

SEQ ID NO: 5214 - RNA, 20 nt, synthetic construct
  misc_feature 1..20: note = source = /note="Description of Artificial Sequence: Synthetic oligonucleotide"
  source 1..20: mol_type = other RNA
gtagagtttgaagtgcctat

SEQ ID NO: 5215 - RNA, 20 nt, synthetic construct
  misc_feature 1..20: note = source = /note="Description of Artificial Sequence: Synthetic oligonucleotide"
  source 1..20: mol_type = other RNA
gaagtgcctatgggacatac

SEQ ID NO: 5216 - RNA, 20 nt, synthetic construct
  misc_feature 1..20: note = source = /note="Description of Artificial Sequence: Synthetic oligonucleotide"
  source 1..20: mol_type = other RNA
acatacaggtacagatgact

SEQ ID NO: 5217 - RNA, 20 nt, synthetic construct
  misc_feature 1..20: note = source = /note="Description of Artificial Sequence: Synthetic oligonucleotide"
  source 1..20: mol_type = other RNA
caaattgtgaactctgctga

SEQ ID NO: 5218 - RNA, 20 nt, synthetic construct
  misc_feature 1..20: note = source = /note="Description of Artificial Sequence: Synthetic oligonucleotide"
  source 1..20: mol_type = other RNA
tgaattgctacttgagttca

SEQ ID NO: 5219 - RNA, 20 nt, synthetic construct
  misc_feature 1..20: note = source = /note="Description of Artificial Sequence: Synthetic oligonucleotide"
  source 1..20: mol_type = other RNA
gaattgctacttgagttcat

SEQ ID NO: 5220 - RNA, 20 nt, synthetic construct
  misc_feature 1..20: note = source = /note="Description of Artificial Sequence: Synthetic oligonucleotide"
  source 1..20: mol_type = other RNA
tgagttcatgggaataaaat

SEQ ID NO: 5221 - RNA, 20 nt, synthetic construct
  misc_feature 1..20: note = source = /note="Description of Artificial Sequence: Synthetic oligonucleotide"
  source 1..20: mol_type = other RNA
ttgttatctcaatatcttcc

SEQ ID NO: 5222 - RNA, 20 nt, synthetic construct
  misc_feature 1..20: note = source = /note="Description of Artificial Sequence: Synthetic oligonucleotide"
  source 1..20: mol_type = other RNA
atatcttcctggccatctct

SEQ ID NO: 5223 - RNA, 20 nt, synthetic construct
  misc_feature 1..20: note = source = /note="Description of Artificial Sequence: Synthetic oligonucleotide"
  source 1..20: mol_type = other RNA
tatcttcctggccatctctt

SEQ ID NO: 5224 - RNA, 20 nt, synthetic construct
  misc_feature 1..20: note = source = /note="Description of Artificial Sequence: Synthetic oligonucleotide"
  source 1..20: mol_type = other RNA
tctttacaatgtcaaaattc

SEQ ID NO: 5225 - RNA, 20 nt, synthetic construct
  misc_feature 1..20: note = source = /note="Description of Artificial Sequence: Synthetic oligonucleotide"
  source 1..20: mol_type = other RNA
tcaaaattctggtgttttta

SEQ ID NO: 5226 - RNA, 20 nt, synthetic construct
  misc_feature 1..20: note = source = /note="Description of Artificial Sequence: Synthetic oligonucleotide"
  source 1..20: mol_type = other RNA
gtttttaaggccccaatctc

SEQ ID NO: 5227 - RNA, 20 nt, synthetic construct
  misc_feature 1..20: note = source = /note="Description of Artificial Sequence: Synthetic oligonucleotide"
  source 1..20: mol_type = other RNA
ttaaggccccaatctcaggc

SEQ ID NO: 5228 - RNA, 20 nt, synthetic construct
  misc_feature 1..20: note = source = /note="Description of Artificial Sequence: Synthetic oligonucleotide"
  source 1..20: mol_type = other RNA
tctccaactgtactcttact

SEQ ID NO: 5229 - RNA, 20 nt, synthetic construct
  misc_feature 1..20: note = source = /note="Description of Artificial Sequence: Synthetic oligonucleotide"
  source 1..20: mol_type = other RNA
ctccaactgtactcttactt

SEQ ID NO: 5230 - RNA, 20 nt, synthetic construct
  misc_feature 1..20: note = source = /note="Description of Artificial Sequence: Synthetic oligonucleotide"
  source 1..20: mol_type = other RNA
gggatgatcttatctagtca

SEQ ID NO: 5231 - RNA, 20 nt, synthetic construct
  misc_feature 1..20: note = source = /note="Description of Artificial Sequence: Synthetic oligonucleotide"
  source 1..20: mol_type = other RNA
ggatgatcttatctagtcat

SEQ ID NO: 5232 - RNA, 20 nt, synthetic construct
  misc_feature 1..20: note = source = /note="Description of Artificial Sequence: Synthetic oligonucleotide"
  source 1..20: mol_type = other RNA
gatgatcttatctagtcatg

SEQ ID NO: 5233 - RNA, 20 nt, synthetic construct
  misc_feature 1..20: note = source = /note="Description of Artificial Sequence: Synthetic oligonucleotide"
  source 1..20: mol_type = other RNA
catggggcattaaataccat

SEQ ID NO: 5234 - RNA, 20 nt, synthetic construct
  misc_feature 1..20: note = source = /note="Description of Artificial Sequence: Synthetic oligonucleotide"
  source 1..20: mol_type = other RNA
gggcattaaataccattggt

SEQ ID NO: 5235 - RNA, 20 nt, synthetic construct
  misc_feature 1..20: note = source = /note="Description of Artificial Sequence: Synthetic oligonucleotide"
  source 1..20: mol_type = other RNA
ttagctcaagacaaaactct

SEQ ID NO: 5236 - RNA, 20 nt, synthetic construct
  misc_feature 1..20: note = source = /note="Description of Artificial Sequence: Synthetic oligonucleotide"
  source 1..20: mol_type = other RNA
ccactgctattctctagttc

SEQ ID NO: 5237 - RNA, 20 nt, synthetic construct
  misc_feature 1..20: note = source = /note="Description of Artificial Sequence: Synthetic oligonucleotide"
  source 1..20: mol_type = other RNA
tcctttctcttgtattactg

SEQ ID NO: 5238 - RNA, 20 nt, synthetic construct
  misc_feature 1..20: note = source = /note="Description of Artificial Sequence: Synthetic oligonucleotide"
  source 1..20: mol_type = other RNA
ctaccagagtgatcttttaa

SEQ ID NO: 5239 - RNA, 20 nt, synthetic construct
  misc_feature 1..20: note = source = /note="Description of Artificial Sequence: Synthetic oligonucleotide"
  source 1..20: mol_type = other RNA
ctttatatataatgcaccta

SEQ ID NO: 5240 - RNA, 20 nt, synthetic construct
  misc_feature 1..20: note = source = /note="Description of Artificial Sequence: Synthetic oligonucleotide"
  source 1..20: mol_type = other RNA
atgcacctatggcttcccac

SEQ ID NO: 5241 - RNA, 20 nt, synthetic construct
  misc_feature 1..20: note = source = /note="Description of Artificial Sequence: Synthetic oligonucleotide"
  source 1..20: mol_type = other RNA
cttaacactttactcctcca

SEQ ID NO: 5242 - RNA, 20 nt, synthetic construct
  misc_feature 1..20: note = source = /note="Description of Artificial Sequence: Synthetic oligonucleotide"
  source 1..20: mol_type = other RNA
tctagctgaatcattcttcc

SEQ ID NO: 5243 - RNA, 20 nt, synthetic construct
  misc_feature 1..20: note = source = /note="Description of Artificial Sequence: Synthetic oligonucleotide"
  source 1..20: mol_type = other RNA
cttccaggtcattctatcat

SEQ ID NO: 5244 - RNA, 20 nt, synthetic construct
  misc_feature 1..20: note = source = /note="Description of Artificial Sequence: Synthetic oligonucleotide"
  source 1..20: mol_type = other RNA
tctgaaattgtttgtttatt

SEQ ID NO: 5245 - RNA, 20 nt, synthetic construct
  misc_feature 1..20: note = source = /note="Description of Artificial Sequence: Synthetic oligonucleotide"
  source 1..20: mol_type = other RNA
tttgtctagataaacttcac

SEQ ID NO: 5246 - RNA, 20 nt, synthetic construct
  misc_feature 1..20: note = source = /note="Description of Artificial Sequence: Synthetic oligonucleotide"
  source 1..20: mol_type = other RNA
tagataaacttcactggtga

SEQ ID NO: 5247 - RNA, 20 nt, synthetic construct
  misc_feature 1..20: note = source = /note="Description of Artificial Sequence: Synthetic oligonucleotide"
  source 1..20: mol_type = other RNA
gaaagaatgttgaagagaag

SEQ ID NO: 5248 - RNA, 20 nt, synthetic construct
  misc_feature 1..20: note = source = /note="Description of Artificial Sequence: Synthetic oligonucleotide"
  source 1..20: mol_type = other RNA
aaagaatgttgaagagaaga

SEQ ID NO: 5249 - RNA, 20 nt, synthetic construct
  misc_feature 1..20: note = source = /note="Description of Artificial Sequence: Synthetic oligonucleotide"
  source 1..20: mol_type = other RNA
gggtccagtccagccccctg

SEQ ID NO: 5250 - RNA, 20 nt, synthetic construct
  misc_feature 1..20: note = source = /note="Description of Artificial Sequence: Synthetic oligonucleotide"
  source 1..20: mol_type = other RNA
ccctgaggtgaccagcattt

SEQ ID NO: 5251 - RNA, 20 nt, synthetic construct
  misc_feature 1..20: note = source = /note="Description of Artificial Sequence: Synthetic oligonucleotide"
  source 1..20: mol_type = other RNA
cctgaggtgaccagcattta

SEQ ID NO: 5252 - RNA, 20 nt, synthetic construct
  misc_feature 1..20: note = source = /note="Description of Artificial Sequence: Synthetic oligonucleotide"
  source 1..20: mol_type = other RNA
agcatttagggaataagccg

SEQ ID NO: 5253 - RNA, 20 nt, synthetic construct
  misc_feature 1..20: note = source = /note="Description of Artificial Sequence: Synthetic oligonucleotide"
  source 1..20: mol_type = other RNA
tagggaataagccgaggcag

SEQ ID NO: 5254 - RNA, 20 nt, synthetic construct
  misc_feature 1..20: note = source = /note="Description of Artificial Sequence: Synthetic oligonucleotide"
  source 1..20: mol_type = other RNA
ggaataagccgaggcagagg

SEQ ID NO: 5255 - RNA, 20 nt, synthetic construct
  misc_feature 1..20: note = source = /note="Description of Artificial Sequence: Synthetic oligonucleotide"
  source 1..20: mol_type = other RNA
gaataagccgaggcagagga

SEQ ID NO: 5256 - RNA, 20 nt, synthetic construct
  misc_feature 1..20: note = source = /note="Description of Artificial Sequence: Synthetic oligonucleotide"
  source 1..20: mol_type = other RNA
gcagaggagggccattaaga

SEQ ID NO: 5257 - RNA, 20 nt, synthetic construct
  misc_feature 1..20: note = source = /note="Description of Artificial Sequence: Synthetic oligonucleotide"
  source 1..20: mol_type = other RNA
gaaggagcaatgagagatag

SEQ ID NO: 5258 - RNA, 20 nt, synthetic construct
  misc_feature 1..20: note = source = /note="Description of Artificial Sequence: Synthetic oligonucleotide"
  source 1..20: mol_type = other RNA
atagaggaaaactaagaaca

SEQ ID NO: 5259 - RNA, 20 nt, synthetic construct
  misc_feature 1..20: note = source = /note="Description of Artificial Sequence: Synthetic oligonucleotide"
  source 1..20: mol_type = other RNA
aagtgagagtgtcctaacac

SEQ ID NO: 5260 - RNA, 20 nt, synthetic construct
  misc_feature 1..20: note = source = /note="Description of Artificial Sequence: Synthetic oligonucleotide"
  source 1..20: mol_type = other RNA
ctaacacaggtctaaatgaa

SEQ ID NO: 5261 - RNA, 20 nt, synthetic construct
  misc_feature 1..20: note = source = /note="Description of Artificial Sequence: Synthetic oligonucleotide"
  source 1..20: mol_type = other RNA
atgaaaggatagttcagaag

SEQ ID NO: 5262 - RNA, 20 nt, synthetic construct
  misc_feature 1..20: note = source = /note="Description of Artificial Sequence: Synthetic oligonucleotide"
  source 1..20: mol_type = other RNA
tgaaaggatagttcagaaga

SEQ ID NO: 5263 - RNA, 20 nt, synthetic construct
  misc_feature 1..20: note = source = /note="Description of Artificial Sequence: Synthetic oligonucleotide"
  source 1..20: mol_type = other RNA
tcagaagagggcactgcagc

SEQ ID NO: 5264 - RNA, 20 nt, synthetic construct
  misc_feature 1..20: note = source = /note="Description of Artificial Sequence: Synthetic oligonucleotide"
  source 1..20: mol_type = other RNA
tggctgaaagagaacaagaa

SEQ ID NO: 5265 - RNA, 20 nt, synthetic construct
  misc_feature 1..20: note = source = /note="Description of Artificial Sequence: Synthetic oligonucleotide"
  source 1..20: mol_type = other RNA
agagaacaagaaaggctgta

SEQ ID NO: 5266 - RNA, 20 nt, synthetic construct
  misc_feature 1..20: note = source = /note="Description of Artificial Sequence: Synthetic oligonucleotide"
  source 1..20: mol_type = other RNA
gaacaagaaaggctgtaagg

SEQ ID NO: 5267 - RNA, 20 nt, synthetic construct
  misc_feature 1..20: note = source = /note="Description of Artificial Sequence: Synthetic oligonucleotide"
  source 1..20: mol_type = other RNA
caagaaaggctgtaaggtgg

SEQ ID NO: 5268 - RNA, 20 nt, synthetic construct
  misc_feature 1..20: note = source = /note="Description of Artificial Sequence: Synthetic oligonucleotide"
  source 1..20: mol_type = other RNA
ttaattgagccgtgaaagat

SEQ ID NO: 5269 - RNA, 20 nt, synthetic construct
  misc_feature 1..20: note = source = /note="Description of Artificial Sequence: Synthetic oligonucleotide"
  source 1..20: mol_type = other RNA
taattgagccgtgaaagata

SEQ ID NO: 5270 - RNA, 20 nt, synthetic construct
  misc_feature 1..20: note = source = /note="Description of Artificial Sequence: Synthetic oligonucleotide"
  source 1..20: mol_type = other RNA
gatagggaaattctgtatga

SEQ ID NO: 5271 - RNA, 20 nt, synthetic construct
  misc_feature 1..20: note = source = /note="Description of Artificial Sequence: Synthetic oligonucleotide"
  source 1..20: mol_type = other RNA
attctgtatgaaggagtaaa

SEQ ID NO: 5272 - RNA, 20 nt, synthetic construct
  misc_feature 1..20: note = source = /note="Description of Artificial Sequence: Synthetic oligonucleotide"
  source 1..20: mol_type = other RNA
ctgtatgaaggagtaaatgg

SEQ ID NO: 5273 - RNA, 20 nt, synthetic construct
  misc_feature 1..20: note = source = /note="Description of Artificial Sequence: Synthetic oligonucleotide"
  source 1..20: mol_type = other RNA
aggagtaaatggaggcatag

SEQ ID NO: 5274 - RNA, 20 nt, synthetic construct
  misc_feature 1..20: note = source = /note="Description of Artificial Sequence: Synthetic oligonucleotide"
  source 1..20: mol_type = other RNA
atggaggcatagaggcatag

SEQ ID NO: 5275 - RNA, 20 nt, synthetic construct
  misc_feature 1..20: note = source = /note="Description of Artificial Sequence: Synthetic oligonucleotide"
  source 1..20: mol_type = other RNA
gcagaagatgcatgcctgtt

SEQ ID NO: 5276 - RNA, 20 nt, synthetic construct
  misc_feature 1..20: note = source = /note="Description of Artificial Sequence: Synthetic oligonucleotide"
  source 1..20: mol_type = other RNA
cagaagatgcatgcctgttt

SEQ ID NO: 5277 - RNA, 20 nt, synthetic construct
  misc_feature 1..20: note = source = /note="Description of Artificial Sequence: Synthetic oligonucleotide"
  source 1..20: mol_type = other RNA
agaagatgcatgcctgtttg

SEQ ID NO: 5278 - RNA, 20 nt, synthetic construct
  misc_feature 1..20: note = source = /note="Description of Artificial Sequence: Synthetic oligonucleotide"
  source 1..20: mol_type = other RNA
gtcactagattaaaaaacaa

SEQ ID NO: 5279 - RNA, 20 nt, synthetic construct
  misc_feature 1..20: note = source = /note="Description of Artificial Sequence: Synthetic oligonucleotide"
  source 1..20: mol_type = other RNA
taaaaaacaaaggctccatc

SEQ ID NO: 5280 - RNA, 20 nt, synthetic construct
  misc_feature 1..20: note = source = /note="Description of Artificial Sequence: Synthetic oligonucleotide"
  source 1..20: mol_type = other RNA
acacagtaaacagaagaata

SEQ ID NO: 5281 - RNA, 20 nt, synthetic construct
  misc_feature 1..20: note = source = /note="Description of Artificial Sequence: Synthetic oligonucleotide"
  source 1..20: mol_type = other RNA
cagaagaatatggatttaaa

SEQ ID NO: 5282 - RNA, 20 nt, synthetic construct
  misc_feature 1..20: note = source = /note="Description of Artificial Sequence: Synthetic oligonucleotide"
  source 1..20: mol_type = other RNA
taagtcattgagattcctta

SEQ ID NO: 5283 - RNA, 20 nt, synthetic construct
  misc_feature 1..20: note = source = /note="Description of Artificial Sequence: Synthetic oligonucleotide"
  source 1..20: mol_type = other RNA
atataacagtatgccaatgt

SEQ ID NO: 5284 - RNA, 20 nt, synthetic construct
  misc_feature 1..20: note = source = /note="Description of Artificial Sequence: Synthetic oligonucleotide"
  source 1..20: mol_type = other RNA
agtatgccaatgtaggaatg

SEQ ID NO: 5285 - RNA, 20 nt, synthetic construct
  misc_feature 1..20: note = source = /note="Description of Artificial Sequence: Synthetic oligonucleotide"
  source 1..20: mol_type = other RNA
ggaatgaggcgtgaataagc

SEQ ID NO: 5286 - RNA, 20 nt, synthetic construct
  misc_feature 1..20: note = source = /note="Description of Artificial Sequence: Synthetic oligonucleotide"
  source 1..20: mol_type = other RNA
gaatgaggcgtgaataagca

SEQ ID NO: 5287 - RNA, 20 nt, synthetic construct
  misc_feature 1..20: note = source = /note="Description of Artificial Sequence: Synthetic oligonucleotide"
  source 1..20: mol_type = other RNA
tctcaccttgattattcctt

SEQ ID NO: 5288 - RNA, 20 nt, synthetic construct
  misc_feature 1..20: note = source = /note="Description of Artificial Sequence: Synthetic oligonucleotide"
  source 1..20: mol_type = other RNA
ttattcctttggtagcttca

SEQ ID NO: 5289 - RNA, 20 nt, synthetic construct
  misc_feature 1..20: note = source = /note="Description of Artificial Sequence: Synthetic oligonucleotide"
  source 1..20: mol_type = other RNA
tattcctttggtagcttcaa

SEQ ID NO: 5290 - RNA, 20 nt, synthetic construct
  misc_feature 1..20: note = source = /note="Description of Artificial Sequence: Synthetic oligonucleotide"
  source 1..20: mol_type = other RNA
ttcaagggaaattgagtttg

SEQ ID NO: 5291 - RNA, 20 nt, synthetic construct
  misc_feature 1..20: note = source = /note="Description of Artificial Sequence: Synthetic oligonucleotide"
  source 1..20: mol_type = other RNA
gcagtttttatctagtcaga

SEQ ID NO: 5292 - RNA, 20 nt, synthetic construct
  misc_feature 1..20: note = source = /note="Description of Artificial Sequence: Synthetic oligonucleotide"
  source 1..20: mol_type = other RNA
gtcagatggttgagaagtcc

SEQ ID NO: 5293 - RNA, 20 nt, synthetic construct
  misc_feature 1..20: note = source = /note="Description of Artificial Sequence: Synthetic oligonucleotide"
  source 1..20: mol_type = other RNA
tcagtgtacctttcagattg

SEQ ID NO: 5294 - RNA, 20 nt, synthetic construct
  misc_feature 1..20: note = source = /note="Description of Artificial Sequence: Synthetic oligonucleotide"
  source 1..20: mol_type = other RNA
aataagctcatgttagtttc

SEQ ID NO: 5295 - RNA, 20 nt, synthetic construct
  misc_feature 1..20: note = source = /note="Description of Artificial Sequence: Synthetic oligonucleotide"
  source 1..20: mol_type = other RNA
taatatttacatataatgac

SEQ ID NO: 5296 - RNA, 20 nt, synthetic construct
  misc_feature 1..20: note = source = /note="Description of Artificial Sequence: Synthetic oligonucleotide"
  source 1..20: mol_type = other RNA
cctgtatttgcctttatttg

SEQ ID NO: 5297 - RNA, 20 nt, synthetic construct
  misc_feature 1..20: note = source = /note="Description of Artificial Sequence: Synthetic oligonucleotide"
  source 1..20: mol_type = other RNA
ctgtatttgcctttatttgt

SEQ ID NO: 5298 - RNA, 20 nt, synthetic construct
  misc_feature 1..20: note = source = /note="Description of Artificial Sequence: Synthetic oligonucleotide"
  source 1..20: mol_type = other RNA
caaaattttcaaattgtgta

SEQ ID NO: 5299 - RNA, 20 nt, synthetic construct
  misc_feature 1..20: note = source = /note="Description of Artificial Sequence: Synthetic oligonucleotide"
  source 1..20: mol_type = other RNA
attttcaaattgtgtatggc

SEQ ID NO: 5300 - RNA, 20 nt, synthetic construct
  misc_feature 1..20: note = source = /note="Description of Artificial Sequence: Synthetic oligonucleotide"
  source 1..20: mol_type = other RNA
atggctggtctatattttct

SEQ ID NO: 5301 - RNA, 20 nt, synthetic construct
  misc_feature 1..20: note = source = /note="Description of Artificial Sequence: Synthetic oligonucleotide"
  source 1..20: mol_type = other RNA
ttttctaggactgtcctttc

SEQ ID NO: 5302 - RNA, 20 nt, synthetic construct
  misc_feature 1..20: note = source = /note="Description of Artificial Sequence: Synthetic oligonucleotide"
  source 1..20: mol_type = other RNA
aaaaatattaatttccagcc

SEQ ID NO: 5303 - RNA, 20 nt, synthetic construct
  misc_feature 1..20: note = source = /note="Description of Artificial Sequence: Synthetic oligonucleotide"
  source 1..20: mol_type = other RNA
tattaatttccagccaggtg

SEQ ID NO: 5304 - RNA, 20 nt, synthetic construct
  misc_feature 1..20: note = source = /note="Description of Artificial Sequence: Synthetic oligonucleotide"
  source 1..20: mol_type = other RNA
cgcctgtaatcccagcactt

SEQ ID NO: 5305 - RNA, 20 nt, synthetic construct
  misc_feature 1..20: note = source = /note="Description of Artificial Sequence: Synthetic oligonucleotide"
  source 1..20: mol_type = other RNA
gcctgtaatcccagcacttt

SEQ ID NO: 5306 - RNA, 20 nt, synthetic construct
  misc_feature 1..20: note = source = /note="Description of Artificial Sequence: Synthetic oligonucleotide"
  source 1..20: mol_type = other RNA
tgtaatcccagcactttggg

SEQ ID NO: 5307 - RNA, 20 nt, synthetic construct
  misc_feature 1..20: note = source = /note="Description of Artificial Sequence: Synthetic oligonucleotide"
  source 1..20: mol_type = other RNA
cccagcactttgggaggctg

SEQ ID NO: 5308 - RNA, 20 nt, synthetic construct
  misc_feature 1..20: note = source = /note="Description of Artificial Sequence: Synthetic oligonucleotide"
  source 1..20: mol_type = other RNA
agcactttgggaggctgagg

SEQ ID NO: 5309 - RNA, 20 nt, synthetic construct
  misc_feature 1..20: note = source = /note="Description of Artificial Sequence: Synthetic oligonucleotide"
  source 1..20: mol_type = other RNA
gcactttgggaggctgaggc

SEQ ID NO: 5310 - RNA, 20 nt, synthetic construct
  misc_feature 1..20: note = source = /note="Description of Artificial Sequence: Synthetic oligonucleotide"
  source 1..20: mol_type = other RNA
ctttgggaggctgaggcggg

SEQ ID NO: 5311 - RNA, 20 nt, synthetic construct
  misc_feature 1..20: note = source = /note="Description of Artificial Sequence: Synthetic oligonucleotide"
  source 1..20: mol_type = other RNA
cgggtggatcacctgaagtc

SEQ ID NO: 5312 - RNA, 20 nt, synthetic construct
  misc_feature 1..20: note = source = /note="Description of Artificial Sequence: Synthetic oligonucleotide"
  source 1..20: mol_type = other RNA
tcaggagttcaaaaccagcc

SEQ ID NO: 5313 - RNA, 20 nt, synthetic construct
  misc_feature 1..20: note = source = /note="Description of Artificial Sequence: Synthetic oligonucleotide"
  source 1..20: mol_type = other RNA
caaaaccagcctggccaaca

SEQ ID NO: 5314 - RNA, 20 nt, synthetic construct
  misc_feature 1..20: note = source = /note="Description of Artificial Sequence: Synthetic oligonucleotide"
  source 1..20: mol_type = other RNA
taaaaatacaaaaactagcc

SEQ ID NO: 5315 - RNA, 20 nt, synthetic construct
  misc_feature 1..20: note = source = /note="Description of Artificial Sequence: Synthetic oligonucleotide"
  source 1..20: mol_type = other RNA
atacaaaaactagccaggca

SEQ ID NO: 5316 - RNA, 20 nt, synthetic construct
  misc_feature 1..20: note = source = /note="Description of Artificial Sequence: Synthetic oligonucleotide"
  source 1..20: mol_type = other RNA
caaaaactagccaggcatgg

SEQ ID NO: 5317 - RNA, 20 nt, synthetic construct
  misc_feature 1..20: note = source = /note="Description of Artificial Sequence: Synthetic oligonucleotide"
  source 1..20: mol_type = other RNA
tgcctgtagtcccagatact

SEQ ID NO: 5318 - RNA, 20 nt, synthetic construct
  misc_feature 1..20: note = source = /note="Description of Artificial Sequence: Synthetic oligonucleotide"
  source 1..20: mol_type = other RNA
tgtagtcccagatacttgga

SEQ ID NO: 5319 - RNA, 20 nt, synthetic construct
  misc_feature 1..20: note = source = /note="Description of Artificial Sequence: Synthetic oligonucleotide"
  source 1..20: mol_type = other RNA
cccagatacttggatggctg

SEQ ID NO: 5320 - RNA, 20 nt, synthetic construct
  misc_feature 1..20: note = source = /note="Description of Artificial Sequence: Synthetic oligonucleotide"
  source 1..20: mol_type = other RNA
gatacttggatggctgaggc

SEQ ID NO: 5321 - RNA, 20 nt, synthetic construct
  misc_feature 1..20: note = source = /note="Description of Artificial Sequence: Synthetic oligonucleotide"
  source 1..20: mol_type = other RNA
caggagaatcacttgaaccc

SEQ ID NO: 5322 - RNA, 20 nt, synthetic construct
  misc_feature 1..20: note = source = /note="Description of Artificial Sequence: Synthetic oligonucleotide"
  source 1..20: mol_type = other RNA
gagaatcacttgaacccagg

SEQ ID NO: 5323 - RNA, 20 nt, synthetic construct
  misc_feature 1..20: note = source = /note="Description of Artificial Sequence: Synthetic oligonucleotide"
  source 1..20: mol_type = other RNA
aatcacttgaacccaggagg

SEQ ID NO: 5324 - RNA, 20 nt, synthetic construct
  misc_feature 1..20: note = source = /note="Description of Artificial Sequence: Synthetic oligonucleotide"
  source 1..20: mol_type = other RNA
cacttgaacccaggaggcgg

SEQ ID NO: 5325 - RNA, 20 nt, synthetic construct
  misc_feature 1..20: note = source = /note="Description of Artificial Sequence: Synthetic oligonucleotide"
  source 1..20: mol_type = other RNA
tgtgccactgcactctagcc

SEQ ID NO: 5326 - RNA, 20 nt, synthetic construct
  misc_feature 1..20: note = source = /note="Description of Artificial Sequence: Synthetic oligonucleotide"
  source 1..20: mol_type = other RNA
agagtgagaatctgtctcag

SEQ ID NO: 5327 - RNA, 20 nt, synthetic construct
  misc_feature 1..20: note = source = /note="Description of Artificial Sequence: Synthetic oligonucleotide"
  source 1..20: mol_type = other RNA
cacccaccaaaagactccat

SEQ ID NO: 5328 - RNA, 20 nt, synthetic construct
  misc_feature 1..20: note = source = /note="Description of Artificial Sequence: Synthetic oligonucleotide"
  source 1..20: mol_type = other RNA
tttctgacatagaaatatac

SEQ ID NO: 5329 - RNA, 20 nt, synthetic construct
  misc_feature 1..20: note = source = /note="Description of Artificial Sequence: Synthetic oligonucleotide"
  source 1..20: mol_type = other RNA
gctaatagtgactattttct

SEQ ID NO: 5330 - RNA, 20 nt, synthetic construct
  misc_feature 1..20: note = source = /note="Description of Artificial Sequence: Synthetic oligonucleotide"
  source 1..20: mol_type = other RNA
ctaatagtgactattttcta

SEQ ID NO: 5331 - RNA, 20 nt, synthetic construct
  misc_feature 1..20: note = source = /note="Description of Artificial Sequence: Synthetic oligonucleotide"
  source 1..20: mol_type = other RNA
tttgttattctaagtcataa

SEQ ID NO: 5332 - RNA, 20 nt, synthetic construct
  misc_feature 1..20: note = source = /note="Description of Artificial Sequence: Synthetic oligonucleotide"
  source 1..20: mol_type = other RNA
taagtcataaaggcagaatt

SEQ ID NO: 5333 - RNA, 20 nt, synthetic construct
  misc_feature 1..20: note = source = /note="Description of Artificial Sequence: Synthetic oligonucleotide"
  source 1..20: mol_type = other RNA
gcttttcaaatatgcagaag

SEQ ID NO: 5334 - RNA, 20 nt, synthetic construct
  misc_feature 1..20: note = source = /note="Description of Artificial Sequence: Synthetic oligonucleotide"
  source 1..20: mol_type = other RNA
gcagaagaggaaaaattgag

SEQ ID NO: 5335 - RNA, 20 nt, synthetic construct
  misc_feature 1..20: note = source = /note="Description of Artificial Sequence: Synthetic oligonucleotide"
  source 1..20: mol_type = other RNA
aaattgagtttgaaacttac

SEQ ID NO: 5336 - RNA, 20 nt, synthetic construct
  misc_feature 1..20: note = source = /note="Description of Artificial Sequence: Synthetic oligonucleotide"
  source 1..20: mol_type = other RNA
tatacctatgcttgaccaaa

SEQ ID NO: 5337 - RNA, 20 nt, synthetic construct
  misc_feature 1..20: note = source = /note="Description of Artificial Sequence: Synthetic oligonucleotide"
  source 1..20: mol_type = other RNA
tcaagcatttccctttacct

SEQ ID NO: 5338 - RNA, 20 nt, synthetic construct
  misc_feature 1..20: note = source = /note="Description of Artificial Sequence: Synthetic oligonucleotide"
  source 1..20: mol_type = other RNA
actaccaaaagcccttcatt

SEQ ID NO: 5339 - RNA, 20 nt, synthetic construct
  misc_feature 1..20: note = source = /note="Description of Artificial Sequence: Synthetic oligonucleotide"
  source 1..20: mol_type = other RNA
ctccatagttgcatgtctga

SEQ ID NO: 5340 - RNA, 20 nt, synthetic construct
  misc_feature 1..20: note = source = /note="Description of Artificial Sequence: Synthetic oligonucleotide"
  source 1..20: mol_type = other RNA
aattgtcattctgtttccca

SEQ ID NO: 5341 - RNA, 20 nt, synthetic construct
  misc_feature 1..20: note = source = /note="Description of Artificial Sequence: Synthetic oligonucleotide"
  source 1..20: mol_type = other RNA
tagtacagtactctgctcac

SEQ ID NO: 5342 - RNA, 20 nt, synthetic construct
  misc_feature 1..20: note = source = /note="Description of Artificial Sequence: Synthetic oligonucleotide"
  source 1..20: mol_type = other RNA
agttgagctacgttttttta

SEQ ID NO: 5343 - RNA, 20 nt, synthetic construct
  misc_feature 1..20: note = source = /note="Description of Artificial Sequence: Synthetic oligonucleotide"
  source 1..20: mol_type = other RNA
agagtctccctctgtcgccc

SEQ ID NO: 5344 - RNA, 20 nt, synthetic construct
  misc_feature 1..20: note = source = /note="Description of Artificial Sequence: Synthetic oligonucleotide"
  source 1..20: mol_type = other RNA
gagtctccctctgtcgccca

SEQ ID NO: 5345 - RNA, 20 nt, synthetic construct
  misc_feature 1..20: note = source = /note="Description of Artificial Sequence: Synthetic oligonucleotide"
  source 1..20: mol_type = other RNA
tctccctctgtcgcccaggg

SEQ ID NO: 5346 - RNA, 20 nt, synthetic construct
  misc_feature 1..20: note = source = /note="Description of Artificial Sequence: Synthetic oligonucleotide"
  source 1..20: mol_type = other RNA
tcgcccagggtggagtacag

SEQ ID NO: 5347 - RNA, 20 nt, synthetic construct
  misc_feature 1..20: note = source = /note="Description of Artificial Sequence: Synthetic oligonucleotide"
  source 1..20: mol_type = other RNA
ctcactgcaacctctgctgc

SEQ ID NO: 5348 - RNA, 20 nt, synthetic construct
  misc_feature 1..20: note = source = /note="Description of Artificial Sequence: Synthetic oligonucleotide"
  source 1..20: mol_type = other RNA
tcactgcaacctctgctgct

SEQ ID NO: 5349 - RNA, 20 nt, synthetic construct
  misc_feature 1..20: note = source = /note="Description of Artificial Sequence: Synthetic oligonucleotide"
  source 1..20: mol_type = other RNA
gtctcagactcccgagtagc

SEQ ID NO: 5350 - RNA, 20 nt, synthetic construct
  misc_feature 1..20: note = source = /note="Description of Artificial Sequence: Synthetic oligonucleotide"
  source 1..20: mol_type = other RNA
tctcagactcccgagtagct

SEQ ID NO: 5351 - RNA, 20 nt, synthetic construct
  misc_feature 1..20: note = source = /note="Description of Artificial Sequence: Synthetic oligonucleotide"
  source 1..20: mol_type = other RNA
taccaccatgccaccatgcc

SEQ ID NO: 5352 - RNA, 20 nt, synthetic construct
  misc_feature 1..20: note = source = /note="Description of Artificial Sequence: Synthetic oligonucleotide"
  source 1..20: mol_type = other RNA
gctaacttttagtagaaaca

SEQ ID NO: 5353 - RNA, 20 nt, synthetic construct
  misc_feature 1..20: note = source = /note="Description of Artificial Sequence: Synthetic oligonucleotide"
  source 1..20: mol_type = other RNA
gaaacaaggtttcaccatgt

SEQ ID NO: 5354 - RNA, 20 nt, synthetic construct
  misc_feature 1..20: note = source = /note="Description of Artificial Sequence: Synthetic oligonucleotide"
  source 1..20: mol_type = other RNA
aaggtttcaccatgttggcc

SEQ ID NO: 5355 - RNA, 20 nt, synthetic construct
  misc_feature 1..20: note = source = /note="Description of Artificial Sequence: Synthetic oligonucleotide"
  source 1..20: mol_type = other RNA
tttcaccatgttggccaggc

SEQ ID NO: 5356 - RNA, 20 nt, synthetic construct
  misc_feature 1..20: note = source = /note="Description of Artificial Sequence: Synthetic oligonucleotide"
  source 1..20: mol_type = other RNA
ccaggctggtctccaactcc

SEQ ID NO: 5357 - RNA, 20 nt, synthetic construct
  misc_feature 1..20: note = source = /note="Description of Artificial Sequence: Synthetic oligonucleotide"
  source 1..20: mol_type = other RNA
ctcaagtgatccacctgcct

SEQ ID NO: 5358 - RNA, 20 nt, synthetic construct
  misc_feature 1..20: note = source = /note="Description of Artificial Sequence: Synthetic oligonucleotide"
  source 1..20: mol_type = other RNA
ccttggcctcataaagtgct

SEQ ID NO: 5359 - RNA, 20 nt, synthetic construct
  misc_feature 1..20: note = source = /note="Description of Artificial Sequence: Synthetic oligonucleotide"
  source 1..20: mol_type = other RNA
tgtcatgttacgatatatat

SEQ ID NO: 5360 - RNA, 20 nt, synthetic construct
  misc_feature 1..20: note = source = /note="Description of Artificial Sequence: Synthetic oligonucleotide"
  source 1..20: mol_type = other RNA
tatatattggtttttgtcca

SEQ ID NO: 5361 - RNA, 20 nt, synthetic construct
  misc_feature 1..20: note = source = /note="Description of Artificial Sequence: Synthetic oligonucleotide"
  source 1..20: mol_type = other RNA
tggtttttgtccatggtttc

SEQ ID NO: 5362 - RNA, 20 nt, synthetic construct
  misc_feature 1..20: note = source = /note="Description of Artificial Sequence: Synthetic oligonucleotide"
  source 1..20: mol_type = other RNA
tacagtcttttgttagaatg

SEQ ID NO: 5363 - RNA, 20 nt, synthetic construct
  misc_feature 1..20: note = source = /note="Description of Artificial Sequence: Synthetic oligonucleotide"
  source 1..20: mol_type = other RNA
acagtcttttgttagaatgt

SEQ ID NO: 5364 - RNA, 20 nt, synthetic construct
  misc_feature 1..20: note = source = /note="Description of Artificial Sequence: Synthetic oligonucleotide"
  source 1..20: mol_type = other RNA
cagtcttttgttagaatgtg

SEQ ID NO: 5365 - RNA, 20 nt, synthetic construct
  misc_feature 1..20: note = source = /note="Description of Artificial Sequence: Synthetic oligonucleotide"
  source 1..20: mol_type = other RNA
tgttagaatgtggggtgtgt

SEQ ID NO: 5366 - RNA, 20 nt, synthetic construct
  misc_feature 1..20: note = source = /note="Description of Artificial Sequence: Synthetic oligonucleotide"
  source 1..20: mol_type = other RNA
atgtggggtgtgttggacct

SEQ ID NO: 5367 - RNA, 20 nt, synthetic construct
  misc_feature 1..20: note = source = /note="Description of Artificial Sequence: Synthetic oligonucleotide"
  source 1..20: mol_type = other RNA
tgtggggtgtgttggacctc

SEQ ID NO: 5368 - RNA, 20 nt, synthetic construct
  misc_feature 1..20: note = source = /note="Description of Artificial Sequence: Synthetic oligonucleotide"
  source 1..20: mol_type = other RNA
gtggggtgtgttggacctcg

SEQ ID NO: 5369 - RNA, 20 nt, synthetic construct
  misc_feature 1..20: note = source = /note="Description of Artificial Sequence: Synthetic oligonucleotide"
  source 1..20: mol_type = other RNA
ggtgtgttggacctcggggc

SEQ ID NO: 5370 - RNA, 20 nt, synthetic construct
  misc_feature 1..20: note = source = /note="Description of Artificial Sequence: Synthetic oligonucleotide"
  source 1..20: mol_type = other RNA
ttcctttcacttgtcccccg

SEQ ID NO: 5371 - RNA, 20 nt, synthetic construct
  misc_feature 1..20: note = source = /note="Description of Artificial Sequence: Synthetic oligonucleotide"
  source 1..20: mol_type = other RNA
tcctttcacttgtcccccga

SEQ ID NO: 5372 - RNA, 20 nt, synthetic construct
  misc_feature 1..20: note = source = /note="Description of Artificial Sequence: Synthetic oligonucleotide"
  source 1..20: mol_type = other RNA
aagacttccctgtgtcaccc

SEQ ID NO: 5373 - RNA, 20 nt, synthetic construct
  misc_feature 1..20: note = source = /note="Description of Artificial Sequence: Synthetic oligonucleotide"
  source 1..20: mol_type = other RNA
cttccctgtgtcacccaggc

SEQ ID NO: 5374 - RNA, 20 nt, synthetic construct
  misc_feature 1..20: note = source = /note="Description of Artificial Sequence: Synthetic oligonucleotide"
  source 1..20: mol_type = other RNA
tcacccaggctggagtgcag

SEQ ID NO: 5375 - RNA, 20 nt, synthetic construct
  misc_feature 1..20: note = source = /note="Description of Artificial Sequence: Synthetic oligonucleotide"
  source 1..20: mol_type = other RNA
caccgcagcctcagcctcct

SEQ ID NO: 5376 - RNA, 20 nt, synthetic construct
  misc_feature 1..20: note = source = /note="Description of Artificial Sequence: Synthetic oligonucleotide"
  source 1..20: mol_type = other RNA
atctcagcctcccaagtacc

SEQ ID NO: 5377 - RNA, 20 nt, synthetic construct
  misc_feature 1..20: note = source = /note="Description of Artificial Sequence: Synthetic oligonucleotide"
  source 1..20: mol_type = other RNA
tctcagcctcccaagtacct

SEQ ID NO: 5378 - RNA, 20 nt, synthetic construct
  misc_feature 1..20: note = source = /note="Description of Artificial Sequence: Synthetic oligonucleotide"
  source 1..20: mol_type = other RNA
tcccaagtacctgggactac

SEQ ID NO: 5379 - RNA, 20 nt, synthetic construct
  misc_feature 1..20: note = source = /note="Description of Artificial Sequence: Synthetic oligonucleotide"
  source 1..20: mol_type = other RNA
caggcacatgccaccacacc

SEQ ID NO: 5380 - RNA, 20 nt, synthetic construct
  misc_feature 1..20: note = source = /note="Description of Artificial Sequence: Synthetic oligonucleotide"
  source 1..20: mol_type = other RNA
ttttttttttttttgtagag

SEQ ID NO: 5381 - RNA, 20 nt, synthetic construct
  misc_feature 1..20: note = source = /note="Description of Artificial Sequence: Synthetic oligonucleotide"
  source 1..20: mol_type = other RNA
tttcgccatgttgcccagtc

SEQ ID NO: 5382 - RNA, 20 nt, synthetic construct
  misc_feature 1..20: note = source = /note="Description of Artificial Sequence: Synthetic oligonucleotide"
  source 1..20: mol_type = other RNA
ccagtctggcctccagctcc

SEQ ID NO: 5383 - RNA, 20 nt, synthetic construct
  misc_feature 1..20: note = source = /note="Description of Artificial Sequence: Synthetic oligonucleotide"
  source 1..20: mol_type = other RNA
cagtctggcctccagctcct

SEQ ID NO: 5384 - RNA, 20 nt, synthetic construct
  misc_feature 1..20: note = source = /note="Description of Artificial Sequence: Synthetic oligonucleotide"
  source 1..20: mol_type = other RNA
ctcaagtgatccacccacct

SEQ ID NO: 5385 - RNA, 20 nt, synthetic construct
  misc_feature 1..20: note = source = /note="Description of Artificial Sequence: Synthetic oligonucleotide"
  source 1..20: mol_type = other RNA
aaccaccacacccaaccctg

SEQ ID NO: 5386 - RNA, 20 nt, synthetic construct
  misc_feature 1..20: note = source = /note="Description of Artificial Sequence: Synthetic oligonucleotide"
  source 1..20: mol_type = other RNA
accaccacacccaaccctga

SEQ ID NO: 5387 - RNA, 20 nt, synthetic construct
  misc_feature 1..20: note = source = /note="Description of Artificial Sequence: Synthetic oligonucleotide"
  source 1..20: mol_type = other RNA
gagtcttaaaaccccagaga

SEQ ID NO: 5388 - RNA, 20 nt, synthetic construct
  misc_feature 1..20: note = source = /note="Description of Artificial Sequence: Synthetic oligonucleotide"
  source 1..20: mol_type = other RNA
gaaggtcccaccctttgcac

SEQ ID NO: 5389 - RNA, 20 nt, synthetic construct
  misc_feature 1..20: note = source = /note="Description of Artificial Sequence: Synthetic oligonucleotide"
  source 1..20: mol_type = other RNA
aaggtcccaccctttgcact

SEQ ID NO: 5390 - RNA, 20 nt, synthetic construct
  misc_feature 1..20: note = source = /note="Description of Artificial Sequence: Synthetic oligonucleotide"
  source 1..20: mol_type = other RNA
aggtcccaccctttgcactg

SEQ ID NO: 5391 - RNA, 20 nt, synthetic construct
  misc_feature 1..20: note = source = /note="Description of Artificial Sequence: Synthetic oligonucleotide"
  source 1..20: mol_type = other RNA
ccaccctttgcactggggaa

SEQ ID NO: 5392 - RNA, 20 nt, synthetic construct
  misc_feature 1..20: note = source = /note="Description of Artificial Sequence: Synthetic oligonucleotide"
  source 1..20: mol_type = other RNA
tgaagcctccataaaaactc

SEQ ID NO: 5393 - RNA, 20 nt, synthetic construct
  misc_feature 1..20: note = source = /note="Description of Artificial Sequence: Synthetic oligonucleotide"
  source 1..20: mol_type = other RNA
agcctccataaaaactcagg

SEQ ID NO: 5394 - RNA, 20 nt, synthetic construct
  misc_feature 1..20: note = source = /note="Description of Artificial Sequence: Synthetic oligonucleotide"
  source 1..20: mol_type = other RNA
aaactcaggaggattgagtc

SEQ ID NO: 5395 - RNA, 20 nt, synthetic construct
  misc_feature 1..20: note = source = /note="Description of Artificial Sequence: Synthetic oligonucleotide"
  source 1..20: mol_type = other RNA
aactcaggaggattgagtct

SEQ ID NO: 5396 - RNA, 20 nt, synthetic construct
  misc_feature 1..20: note = source = /note="Description of Artificial Sequence: Synthetic oligonucleotide"
  source 1..20: mol_type = other RNA
actcaggaggattgagtctg

SEQ ID NO: 5397 - RNA, 20 nt, synthetic construct
  misc_feature 1..20: note = source = /note="Description of Artificial Sequence: Synthetic oligonucleotide"
  source 1..20: mol_type = other RNA
gattgagtctggggagcttc

SEQ ID NO: 5398 - RNA, 20 nt, synthetic construct
  misc_feature 1..20: note = source = /note="Description of Artificial Sequence: Synthetic oligonucleotide"
  source 1..20: mol_type = other RNA
cttctggatagctgaaccag

SEQ ID NO: 5399 - RNA, 20 nt, synthetic construct
  misc_feature 1..20: note = source = /note="Description of Artificial Sequence: Synthetic oligonucleotide"
  source 1..20: mol_type = other RNA
ctggatagctgaaccagtgg

SEQ ID NO: 5400 - RNA, 20 nt, synthetic construct
  misc_feature 1..20: note = source = /note="Description of Artificial Sequence: Synthetic oligonucleotide"
  source 1..20: mol_type = other RNA
gctgaaccagtggaggttcc

SEQ ID NO: 5401 - RNA, 20 nt, synthetic construct
  misc_feature 1..20: note = source = /note="Description of Artificial Sequence: Synthetic oligonucleotide"
  source 1..20: mol_type = other RNA
aaccagtggaggttcctgga

SEQ ID NO: 5402 - RNA, 20 nt, synthetic construct
  misc_feature 1..20: note = source = /note="Description of Artificial Sequence: Synthetic oligonucleotide"
  source 1..20: mol_type = other RNA
cagtggaggttcctggaagg

SEQ ID NO: 5403 - RNA, 20 nt, synthetic construct
  misc_feature 1..20: note = source = /note="Description of Artificial Sequence: Synthetic oligonucleotide"
  source 1..20: mol_type = other RNA
tcctggaaggtggctcatcc

SEQ ID NO: 5404 - RNA, 20 nt, synthetic construct
  misc_feature 1..20: note = source = /note="Description of Artificial Sequence: Synthetic oligonucleotide"
  source 1..20: mol_type = other RNA
cctggaaggtggctcatcca

SEQ ID NO: 5405 - RNA, 20 nt, synthetic construct
  misc_feature 1..20: note = source = /note="Description of Artificial Sequence: Synthetic oligonucleotide"
  source 1..20: mol_type = other RNA
ggaaggtggctcatccaggg

SEQ ID NO: 5406 - RNA, 20 nt, synthetic construct
  misc_feature 1..20: note = source = /note="Description of Artificial Sequence: Synthetic oligonucleotide"
  source 1..20: mol_type = other RNA
caaacgtattgaacccaaag

SEQ ID NO: 5407 - RNA, 20 nt, synthetic construct
  misc_feature 1..20: note = source = /note="Description of Artificial Sequence: Synthetic oligonucleotide"
  source 1..20: mol_type = other RNA
aaacgtattgaacccaaaga

SEQ ID NO: 5408 - RNA, 20 nt, synthetic construct
  misc_feature 1..20: note = source = /note="Description of Artificial Sequence: Synthetic oligonucleotide"
  source 1..20: mol_type = other RNA
tgaacccaaagagggtgttg

SEQ ID NO: 5409 - RNA, 20 nt, synthetic construct
  misc_feature 1..20: note = source = /note="Description of Artificial Sequence: Synthetic oligonucleotide"
  source 1..20: mol_type = other RNA
gaacccaaagagggtgttgt

SEQ ID NO: 5410 - RNA, 20 nt, synthetic construct
  misc_feature 1..20: note = source = /note="Description of Artificial Sequence: Synthetic oligonucleotide"
  source 1..20: mol_type = other RNA
tgggaaccccaactcgaagc

SEQ ID NO: 5411 - RNA, 20 nt, synthetic construct
  misc_feature 1..20: note = source = /note="Description of Artificial Sequence: Synthetic oligonucleotide"
  source 1..20: mol_type = other RNA
aaccccaactcgaagctggt

SEQ ID NO: 5412 - RNA, 20 nt, synthetic construct
  misc_feature 1..20: note = source = /note="Description of Artificial Sequence: Synthetic oligonucleotide"
  source 1..20: mol_type = other RNA
agctggttggtcagaagttc

SEQ ID NO: 5413 - RNA, 20 nt, synthetic construct
  misc_feature 1..20: note = source = /note="Description of Artificial Sequence: Synthetic oligonucleotide"
  source 1..20: mol_type = other RNA
tggttggtcagaagttctgg

SEQ ID NO: 5414 - RNA, 20 nt, synthetic construct
  misc_feature 1..20: note = source = /note="Description of Artificial Sequence: Synthetic oligonucleotide"
  source 1..20: mol_type = other RNA
ggtcagaagttctggaggcc

SEQ ID NO: 5415 - RNA, 20 nt, synthetic construct
  misc_feature 1..20: note = source = /note="Description of Artificial Sequence: Synthetic oligonucleotide"
  source 1..20: mol_type = other RNA
ggatttgtgacttgtgtctg

SEQ ID NO: 5416 - RNA, 20 nt, synthetic construct
  misc_feature 1..20: note = source = /note="Description of Artificial Sequence: Synthetic oligonucleotide"
  source 1..20: mol_type = other RNA
ttgtgacttgtgtctgtggc

SEQ ID NO: 5417 - RNA, 20 nt, synthetic construct
  misc_feature 1..20: note = source = /note="Description of Artificial Sequence: Synthetic oligonucleotide"
  source 1..20: mol_type = other RNA
tgtctgtggcaggagcatct

SEQ ID NO: 5418 - RNA, 20 nt, synthetic construct
  misc_feature 1..20: note = source = /note="Description of Artificial Sequence: Synthetic oligonucleotide"
  source 1..20: mol_type = other RNA
gtctgtggcaggagcatctt

SEQ ID NO: 5419 - RNA, 20 nt, synthetic construct
  misc_feature 1..20: note = source = /note="Description of Artificial Sequence: Synthetic oligonucleotide"
  source 1..20: mol_type = other RNA
ggaactgagcgtttaatcta

SEQ ID NO: 5420 - RNA, 20 nt, synthetic construct
  misc_feature 1..20: note = source = /note="Description of Artificial Sequence: Synthetic oligonucleotide"
  source 1..20: mol_type = other RNA
gaactgagcgtttaatctac

SEQ ID NO: 5421 - RNA, 20 nt, synthetic construct
  misc_feature 1..20: note = source = /note="Description of Artificial Sequence: Synthetic oligonucleotide"
  source 1..20: mol_type = other RNA
aactgagcgtttaatctacg

SEQ ID NO: 5422 - RNA, 20 nt, synthetic construct
  misc_feature 1..20: note = source = /note="Description of Artificial Sequence: Synthetic oligonucleotide"
  source 1..20: mol_type = other RNA
acggggtctgacactgtctc

SEQ ID NO: 5423 - RNA, 20 nt, synthetic construct
  misc_feature 1..20: note = source = /note="Description of Artificial Sequence: Synthetic oligonucleotide"
  source 1..20: mol_type = other RNA
cggggtctgacactgtctcc

SEQ ID NO: 5424 - RNA, 20 nt, synthetic construct
  misc_feature 1..20: note = source = /note="Description of Artificial Sequence: Synthetic oligonucleotide"
  source 1..20: mol_type = other RNA
actgtctccgggaattaaat

SEQ ID NO: 5425 - RNA, 20 nt, synthetic construct
  misc_feature 1..20: note = source = /note="Description of Artificial Sequence: Synthetic oligonucleotide"
  source 1..20: mol_type = other RNA
gtctccgggaattaaattgg

SEQ ID NO: 5426 - RNA, 20 nt, synthetic construct
  misc_feature 1..20: note = source = /note="Description of Artificial Sequence: Synthetic oligonucleotide"
  source 1..20: mol_type = other RNA
tagtgtctgctgcttgttat

SEQ ID NO: 5427 - RNA, 20 nt, synthetic construct
  misc_feature 1..20: note = source = /note="Description of Artificial Sequence: Synthetic oligonucleotide"
  source 1..20: mol_type = other RNA
agtgtctgctgcttgttatt

SEQ ID NO: 5428 - RNA, 20 nt, synthetic construct
  misc_feature 1..20: note = source = /note="Description of Artificial Sequence: Synthetic oligonucleotide"
  source 1..20: mol_type = other RNA
gtgtctgctgcttgttattg

SEQ ID NO: 5429 - RNA, 20 nt, synthetic construct
  misc_feature 1..20: note = source = /note="Description of Artificial Sequence: Synthetic oligonucleotide"
  source 1..20: mol_type = other RNA
gggagaaaccctcacacatt

SEQ ID NO: 5430 - RNA, 20 nt, synthetic construct
  misc_feature 1..20: note = source = /note="Description of Artificial Sequence: Synthetic oligonucleotide"
  source 1..20: mol_type = other RNA
ttgttgtgatgtgagagcag

SEQ ID NO: 5431 - RNA, 20 nt, synthetic construct
  misc_feature 1..20: note = source = /note="Description of Artificial Sequence: Synthetic oligonucleotide"
  source 1..20: mol_type = other RNA
agcagaggaaaaatgcattt

SEQ ID NO: 5432 - RNA, 20 nt, synthetic construct
  misc_feature 1..20: note = source = /note="Description of Artificial Sequence: Synthetic oligonucleotide"
  source 1..20: mol_type = other RNA
aggaaaaatgcattttggag

SEQ ID NO: 5433 - RNA, 20 nt, synthetic construct
  misc_feature 1..20: note = source = /note="Description of Artificial Sequence: Synthetic oligonucleotide"
  source 1..20: mol_type = other RNA
gttttttcctacacagccat

SEQ ID NO: 5434 - RNA, 20 nt, synthetic construct
  misc_feature 1..20: note = source = /note="Description of Artificial Sequence: Synthetic oligonucleotide"
  source 1..20: mol_type = other RNA
gcatttaaactaaaaagaat

SEQ ID NO: 5435 - RNA, 20 nt, synthetic construct
  misc_feature 1..20: note = source = /note="Description of Artificial Sequence: Synthetic oligonucleotide"
  source 1..20: mol_type = other RNA
cttgtaaatgtttataagat

SEQ ID NO: 5436 - RNA, 20 nt, synthetic construct
  misc_feature 1..20: note = source = /note="Description of Artificial Sequence: Synthetic oligonucleotide"
  source 1..20: mol_type = other RNA
ttataagattggtagctgtg

SEQ ID NO: 5437 - RNA, 20 nt, synthetic construct
  misc_feature 1..20: note = source = /note="Description of Artificial Sequence: Synthetic oligonucleotide"
  source 1..20: mol_type = other RNA
tataagattggtagctgtgt

SEQ ID NO: 5438 - RNA, 20 nt, synthetic construct
  misc_feature 1..20: note = source = /note="Description of Artificial Sequence: Synthetic oligonucleotide"
  source 1..20: mol_type = other RNA
ttttgaaaaaagaaacagaa

SEQ ID NO: 5439 - RNA, 20 nt, synthetic construct
  misc_feature 1..20: note = source = /note="Description of Artificial Sequence: Synthetic oligonucleotide"
  source 1..20: mol_type = other RNA
acaaagagaacattgaaaca

SEQ ID NO: 5440 - RNA, 20 nt, synthetic construct
  misc_feature 1..20: note = source = /note="Description of Artificial Sequence: Synthetic oligonucleotide"
  source 1..20: mol_type = other RNA
caaagagaacattgaaacat

SEQ ID NO: 5441 - RNA, 20 nt, synthetic construct
  misc_feature 1..20: note = source = /note="Description of Artificial Sequence: Synthetic oligonucleotide"
  source 1..20: mol_type = other RNA
ccagaatgccaactcatttc

SEQ ID NO: 5442 - RNA, 20 nt, synthetic construct
  misc_feature 1..20: note = source = /note="Description of Artificial Sequence: Synthetic oligonucleotide"
  source 1..20: mol_type = other RNA
cagaatgccaactcatttct

SEQ ID NO: 5443 - RNA, 20 nt, synthetic construct
  misc_feature 1..20: note = source = /note="Description of Artificial Sequence: Synthetic oligonucleotide"
  source 1..20: mol_type = other RNA
agaatgccaactcatttctg

SEQ ID NO: 5444 - RNA, 20 nt, synthetic construct
  misc_feature 1..20: note = source = /note="Description of Artificial Sequence: Synthetic oligonucleotide"
  source 1..20: mol_type = other RNA
tttttatacgataccataaa

SEQ ID NO: 5445 - RNA, 20 nt, synthetic construct
  misc_feature 1..20: note = source = /note="Description of Artificial Sequence: Synthetic oligonucleotide"
  source 1..20: mol_type = other RNA
tatacgataccataaatggt

SEQ ID NO: 5446 - RNA, 20 nt, synthetic construct
  misc_feature 1..20: note = source = /note="Description of Artificial Sequence: Synthetic oligonucleotide"
  source 1..20: mol_type = other RNA
atgatcttgattactaactg

SEQ ID NO: 5447 - RNA, 20 nt, synthetic construct
  misc_feature 1..20: note = source = /note="Description of Artificial Sequence: Synthetic oligonucleotide"
  source 1..20: mol_type = other RNA
tgatcttgattactaactgt

SEQ ID NO: 5448 - RNA, 20 nt, synthetic construct
  misc_feature 1..20: note = source = /note="Description of Artificial Sequence: Synthetic oligonucleotide"
  source 1..20: mol_type = other RNA
aatattagagctagtatact

SEQ ID NO: 5449 - RNA, 20 nt, synthetic construct
  misc_feature 1..20: note = source = /note="Description of Artificial Sequence: Synthetic oligonucleotide"
  source 1..20: mol_type = other RNA
gagctagtatacttggagtt

SEQ ID NO: 5450 - RNA, 20 nt, synthetic construct
  misc_feature 1..20: note = source = /note="Description of Artificial Sequence: Synthetic oligonucleotide"
  source 1..20: mol_type = other RNA
tggagtttggctagtatttc

SEQ ID NO: 5451 - RNA, 20 nt, synthetic construct
  misc_feature 1..20: note = source = /note="Description of Artificial Sequence: Synthetic oligonucleotide"
  source 1..20: mol_type = other RNA
ggagtttggctagtatttct

SEQ ID NO: 5452 - RNA, 20 nt, synthetic construct
  misc_feature 1..20: note = source = /note="Description of Artificial Sequence: Synthetic oligonucleotide"
  source 1..20: mol_type = other RNA
gagtttggctagtatttctg

SEQ ID NO: 5453 - RNA, 20 nt, synthetic construct
  misc_feature 1..20: note = source = /note="Description of Artificial Sequence: Synthetic oligonucleotide"
  source 1..20: mol_type = other RNA
agtttggctagtatttctgg

SEQ ID NO: 5454 - RNA, 20 nt, synthetic construct
  misc_feature 1..20: note = source = /note="Description of Artificial Sequence: Synthetic oligonucleotide"
  source 1..20: mol_type = other RNA
ttggctagtatttctggggg

SEQ ID NO: 5455 - RNA, 20 nt, synthetic construct
  misc_feature 1..20: note = source = /note="Description of Artificial Sequence: Synthetic oligonucleotide"
  source 1..20: mol_type = other RNA
atttctgggggaggtagaag

SEQ ID NO: 5456 - RNA, 20 nt, synthetic construct
  misc_feature 1..20: note = source = /note="Description of Artificial Sequence: Synthetic oligonucleotide"
  source 1..20: mol_type = other RNA
gccacgctgactaaaacaaa

SEQ ID NO: 5457 - RNA, 20 nt, synthetic construct
  misc_feature 1..20: note = source = /note="Description of Artificial Sequence: Synthetic oligonucleotide"
  source 1..20: mol_type = other RNA
tcatagtacttctttgaaac

SEQ ID NO: 5458 - RNA, 20 nt, synthetic construct
  misc_feature 1..20: note = source = /note="Description of Artificial Sequence: Synthetic oligonucleotide"
  source 1..20: mol_type = other RNA
agtacttctttgaaacaggt

SEQ ID NO: 5459 - RNA, 20 nt, synthetic construct
  misc_feature 1..20: note = source = /note="Description of Artificial Sequence: Synthetic oligonucleotide"
  source 1..20: mol_type = other RNA
gtacttctttgaaacaggtc

SEQ ID NO: 5460 - RNA, 20 nt, synthetic construct
  misc_feature 1..20: note = source = /note="Description of Artificial Sequence: Synthetic oligonucleotide"
  source 1..20: mol_type = other RNA
tacttctttgaaacaggtcg

SEQ ID NO: 5461 - RNA, 20 nt, synthetic construct
  misc_feature 1..20: note = source = /note="Description of Artificial Sequence: Synthetic oligonucleotide"
  source 1..20: mol_type = other RNA
acttctttgaaacaggtcgg

SEQ ID NO: 5462 - RNA, 20 nt, synthetic construct
  misc_feature 1..20: note = source = /note="Description of Artificial Sequence: Synthetic oligonucleotide"
  source 1..20: mol_type = other RNA
cttctttgaaacaggtcggg

SEQ ID NO: 5463 - RNA, 20 nt, synthetic construct
  misc_feature 1..20: note = source = /note="Description of Artificial Sequence: Synthetic oligonucleotide"
  source 1..20: mol_type = other RNA
ctttgaaacaggtcgggggg

SEQ ID NO: 5464 - RNA, 20 nt, synthetic construct
  misc_feature 1..20: note = source = /note="Description of Artificial Sequence: Synthetic oligonucleotide"
  source 1..20: mol_type = other RNA
ttttaatcaaagttctttca

SEQ ID NO: 5465 - RNA, 20 nt, synthetic construct
  misc_feature 1..20: note = source = /note="Description of Artificial Sequence: Synthetic oligonucleotide"
  source 1..20: mol_type = other RNA
aagttctttcatggaattgt

SEQ ID NO: 5466 - RNA, 20 nt, synthetic construct
  misc_feature 1..20: note = source = /note="Description of Artificial Sequence: Synthetic oligonucleotide"
  source 1..20: mol_type = other RNA
catggaattgttggtgcttc

SEQ ID NO: 5467 - RNA, 20 nt, synthetic construct
  misc_feature 1..20: note = source = /note="Description of Artificial Sequence: Synthetic oligonucleotide"
  source 1..20: mol_type = other RNA
aattcagtgcttgtcttaac

SEQ ID NO: 5468 - RNA, 20 nt, synthetic construct
  misc_feature 1..20: note = source = /note="Description of Artificial Sequence: Synthetic oligonucleotide"
  source 1..20: mol_type = other RNA
tcagtgcttgtcttaactgg

SEQ ID NO: 5469 - RNA, 20 nt, synthetic construct
  misc_feature 1..20: note = source = /note="Description of Artificial Sequence: Synthetic oligonucleotide"
  source 1..20: mol_type = other RNA
taactggtggacttatttta

SEQ ID NO: 5470 - RNA, 20 nt, synthetic construct
  misc_feature 1..20: note = source = /note="Description of Artificial Sequence: Synthetic oligonucleotide"
  source 1..20: mol_type = other RNA
atggtattatgtttataaga

SEQ ID NO: 5471 - RNA, 20 nt, synthetic construct
  misc_feature 1..20: note = source = /note="Description of Artificial Sequence: Synthetic oligonucleotide"
  source 1..20: mol_type = other RNA
ttttttatactcctaaaaga

SEQ ID NO: 5472 - RNA, 20 nt, synthetic construct
  misc_feature 1..20: note = source = /note="Description of Artificial Sequence: Synthetic oligonucleotide"
  source 1..20: mol_type = other RNA
ctaaaagatggatacgatag

SEQ ID NO: 5473 - RNA, 20 nt, synthetic construct
  misc_feature 1..20: note = source = /note="Description of Artificial Sequence: Synthetic oligonucleotide"
  source 1..20: mol_type = other RNA
taaaagatggatacgataga

SEQ ID NO: 5474 - RNA, 20 nt, synthetic construct
  misc_feature 1..20: note = source = /note="Description of Artificial Sequence: Synthetic oligonucleotide"
  source 1..20: mol_type = other RNA
aaaagatggatacgatagag

SEQ ID NO: 5475 - RNA, 20 nt, synthetic construct
  misc_feature 1..20: note = source = /note="Description of Artificial Sequence: Synthetic oligonucleotide"
  source 1..20: mol_type = other RNA
atggatacgatagaggggaa

SEQ ID NO: 5476 - RNA, 20 nt, synthetic construct
  misc_feature 1..20: note = source = /note="Description of Artificial Sequence: Synthetic oligonucleotide"
  source 1..20: mol_type = other RNA
tggatacgatagaggggaaa

SEQ ID NO: 5477 - RNA, 20 nt, synthetic construct
  misc_feature 1..20: note = source = /note="Description of Artificial Sequence: Synthetic oligonucleotide"
  source 1..20: mol_type = other RNA
ggatacgatagaggggaaag

SEQ ID NO: 5478 - RNA, 20 nt, synthetic construct
  misc_feature 1..20: note = source = /note="Description of Artificial Sequence: Synthetic oligonucleotide"
  source 1..20: mol_type = other RNA
gatacgatagaggggaaagg

SEQ ID NO: 5479 - RNA, 20 nt, synthetic construct
  misc_feature 1..20: note = source = /note="Description of Artificial Sequence: Synthetic oligonucleotide"
  source 1..20: mol_type = other RNA
gggggtaagctacaactttt

SEQ ID NO: 5480 - RNA, 20 nt, synthetic construct
  misc_feature 1..20: note = source = /note="Description of Artificial Sequence: Synthetic oligonucleotide"
  source 1..20: mol_type = other RNA
agctacaacttttaggttgt

SEQ ID NO: 5481 - RNA, 20 nt, synthetic construct
  misc_feature 1..20: note = source = /note="Description of Artificial Sequence: Synthetic oligonucleotide"
  source 1..20: mol_type = other RNA
taaaagtaatgatttgccac

SEQ ID NO: 5482 - RNA, 20 nt, synthetic construct
  misc_feature 1..20: note = source = /note="Description of Artificial Sequence: Synthetic oligonucleotide"
  source 1..20: mol_type = other RNA
tatgaaaaatgccataaact

SEQ ID NO: 5483 - RNA, 20 nt, synthetic construct
  misc_feature 1..20: note = source = /note="Description of Artificial Sequence: Synthetic oligonucleotide"
  source 1..20: mol_type = other RNA
aaagctaattcatcttttag

SEQ ID NO: 5484 - RNA, 20 nt, synthetic construct
  misc_feature 1..20: note = source = /note="Description of Artificial Sequence: Synthetic oligonucleotide"
  source 1..20: mol_type = other RNA
agatgtatagctaagtctgt

SEQ ID NO: 5485 - RNA, 20 nt, synthetic construct
  misc_feature 1..20: note = source = /note="Description of Artificial Sequence: Synthetic oligonucleotide"
  source 1..20: mol_type = other RNA
aagtctgttggacaaactgt

SEQ ID NO: 5486 - RNA, 20 nt, synthetic construct
  misc_feature 1..20: note = source = /note="Description of Artificial Sequence: Synthetic oligonucleotide"
  source 1..20: mol_type = other RNA
gtgaatttatgatatttcct

SEQ ID NO: 5487 - RNA, 20 nt, synthetic construct
  misc_feature 1..20: note = source = /note="Description of Artificial Sequence: Synthetic oligonucleotide"
  source 1..20: mol_type = other RNA
atatttcctaggtaatgtta

SEQ ID NO: 5488 - RNA, 20 nt, synthetic construct
  misc_feature 1..20: note = source = /note="Description of Artificial Sequence: Synthetic oligonucleotide"
  source 1..20: mol_type = other RNA
taggtaatgttaaggttata

SEQ ID NO: 5489 - RNA, 20 nt, synthetic construct
  misc_feature 1..20: note = source = /note="Description of Artificial Sequence: Synthetic oligonucleotide"
  source 1..20: mol_type = other RNA
ttatatggaaatttctttgc

SEQ ID NO: 5490 - RNA, 20 nt, synthetic construct
  misc_feature 1..20: note = source = /note="Description of Artificial Sequence: Synthetic oligonucleotide"
  source 1..20: mol_type = other RNA
tgttattttcaatacatacg

SEQ ID NO: 5491 - RNA, 20 nt, synthetic construct
  misc_feature 1..20: note = source = /note="Description of Artificial Sequence: Synthetic oligonucleotide"
  source 1..20: mol_type = other RNA
gacctttctcttcatttcaa

SEQ ID NO: 5492 - RNA, 20 nt, synthetic construct
  misc_feature 1..20: note = source = /note="Description of Artificial Sequence: Synthetic oligonucleotide"
  source 1..20: mol_type = other RNA
ttcatttcaaaggcataact

SEQ ID NO: 5493 - RNA, 20 nt, synthetic construct
  misc_feature 1..20: note = source = /note="Description of Artificial Sequence: Synthetic oligonucleotide"
  source 1..20: mol_type = other RNA
tttcaaaggcataacttgga

SEQ ID NO: 5494 - RNA, 20 nt, synthetic construct
  misc_feature 1..20: note = source = /note="Description of Artificial Sequence: Synthetic oligonucleotide"
  source 1..20: mol_type = other RNA
tggatggtctgtttagctca

SEQ ID NO: 5495 - RNA, 20 nt, synthetic construct
  misc_feature 1..20: note = source = /note="Description of Artificial Sequence: Synthetic oligonucleotide"
  source 1..20: mol_type = other RNA
aaaagttatgattttgtatt

SEQ ID NO: 5496 - RNA, 20 nt, synthetic construct
  misc_feature 1..20: note = source = /note="Description of Artificial Sequence: Synthetic oligonucleotide"
  source 1..20: mol_type = other RNA
aaagttatgattttgtattt

SEQ ID NO: 5497 - RNA, 20 nt, synthetic construct
  misc_feature 1..20: note = source = /note="Description of Artificial Sequence: Synthetic oligonucleotide"
  source 1..20: mol_type = other RNA
tttgtatttgggcaaagtac

SEQ ID NO: 5498 - RNA, 20 nt, synthetic construct
  misc_feature 1..20: note = source = /note="Description of Artificial Sequence: Synthetic oligonucleotide"
  source 1..20: mol_type = other RNA
cattagaacagcaatataac

SEQ ID NO: 5499 - RNA, 20 nt, synthetic construct
  misc_feature 1..20: note = source = /note="Description of Artificial Sequence: Synthetic oligonucleotide"
  source 1..20: mol_type = other RNA
agctaaagcaaaacttgcat

SEQ ID NO: 5500 - RNA, 20 nt, synthetic construct
  misc_feature 1..20: note = source = /note="Description of Artificial Sequence: Synthetic oligonucleotide"
  source 1..20: mol_type = other RNA
ctcagaactctacatctgag

SEQ ID NO: 5501 - RNA, 20 nt, synthetic construct
  misc_feature 1..20: note = source = /note="Description of Artificial Sequence: Synthetic oligonucleotide"
  source 1..20: mol_type = other RNA
tttatactctcctagtccac

SEQ ID NO: 5502 - RNA, 20 nt, synthetic construct
  misc_feature 1..20: note = source = /note="Description of Artificial Sequence: Synthetic oligonucleotide"
  source 1..20: mol_type = other RNA
tcatatactacatctgaatt

SEQ ID NO: 5503 - RNA, 20 nt, synthetic construct
  misc_feature 1..20: note = source = /note="Description of Artificial Sequence: Synthetic oligonucleotide"
  source 1..20: mol_type = other RNA
catatactacatctgaatta

SEQ ID NO: 5504 - RNA, 20 nt, synthetic construct
  misc_feature 1..20: note = source = /note="Description of Artificial Sequence: Synthetic oligonucleotide"
  source 1..20: mol_type = other RNA
ttccaaagtatgctattcca

SEQ ID NO: 5505 - RNA, 20 nt, synthetic construct
  misc_feature 1..20: note = source = /note="Description of Artificial Sequence: Synthetic oligonucleotide"
  source 1..20: mol_type = other RNA
catggaaatactgtttattc

SEQ ID NO: 5506 - RNA, 20 nt, synthetic construct
  misc_feature 1..20: note = source = /note="Description of Artificial Sequence: Synthetic oligonucleotide"
  source 1..20: mol_type = other RNA
atggaaatactgtttattca

SEQ ID NO: 5507 - RNA, 20 nt, synthetic construct
  misc_feature 1..20: note = source = /note="Description of Artificial Sequence: Synthetic oligonucleotide"
  source 1..20: mol_type = other RNA
tcctgtgtttcattatgtcc

SEQ ID NO: 5508 - RNA, 20 nt, synthetic construct
  misc_feature 1..20: note = source = /note="Description of Artificial Sequence: Synthetic oligonucleotide"
  source 1..20: mol_type = other RNA
tcatcatattaaagactttg

SEQ ID NO: 5509 - RNA, 20 nt, synthetic construct
  misc_feature 1..20: note = source = /note="Description of Artificial Sequence: Synthetic oligonucleotide"
  source 1..20: mol_type = other RNA
acagaactttattttttctc

SEQ ID NO: 5510 - RNA, 20 nt, synthetic construct
  misc_feature 1..20: note = source = /note="Description of Artificial Sequence: Synthetic oligonucleotide"
  source 1..20: mol_type = other RNA
aactttattttttctcaggc

SEQ ID NO: 5511 - RNA, 20 nt, synthetic construct
  misc_feature 1..20: note = source = /note="Description of Artificial Sequence: Synthetic oligonucleotide"
  source 1..20: mol_type = other RNA
atgataagaatctgtttcaa

SEQ ID NO: 5512 - RNA, 20 nt, synthetic construct
  misc_feature 1..20: note = source = /note="Description of Artificial Sequence: Synthetic oligonucleotide"
  source 1..20: mol_type = other RNA
agaatctgtttcaatggtgt

SEQ ID NO: 5513 - RNA, 20 nt, synthetic construct
  misc_feature 1..20: note = source = /note="Description of Artificial Sequence: Synthetic oligonucleotide"
  source 1..20: mol_type = other RNA
gttggtgtacatgtgtgttc

SEQ ID NO: 5514 - RNA, 20 nt, synthetic construct
  misc_feature 1..20: note = source = /note="Description of Artificial Sequence: Synthetic oligonucleotide"
  source 1..20: mol_type = other RNA
tgttcaggtacctacacatt

SEQ ID NO: 5515 - RNA, 20 nt, synthetic construct
  misc_feature 1..20: note = source = /note="Description of Artificial Sequence: Synthetic oligonucleotide"
  source 1..20: mol_type = other RNA
actgcacttataaagagaca

SEQ ID NO: 5516 - RNA, 20 nt, synthetic construct
  misc_feature 1..20: note = source = /note="Description of Artificial Sequence: Synthetic oligonucleotide"
  source 1..20: mol_type = other RNA
catcaagaagacatcatttt

SEQ ID NO: 5517 - RNA, 20 nt, synthetic construct
  misc_feature 1..20: note = source = /note="Description of Artificial Sequence: Synthetic oligonucleotide"
  source 1..20: mol_type = other RNA
atcaagaagacatcatttta

SEQ ID NO: 5518 - RNA, 20 nt, synthetic construct
  misc_feature 1..20: note = source = /note="Description of Artificial Sequence: Synthetic oligonucleotide"
  source 1..20: mol_type = other RNA
aagaagacatcattttaggg

SEQ ID NO: 5519 - RNA, 20 nt, synthetic construct
  misc_feature 1..20: note = source = /note="Description of Artificial Sequence: Synthetic oligonucleotide"
  source 1..20: mol_type = other RNA
tagggtggacaccattgcct

SEQ ID NO: 5520 - RNA, 20 nt, synthetic construct
  misc_feature 1..20: note = source = /note="Description of Artificial Sequence: Synthetic oligonucleotide"
  source 1..20: mol_type = other RNA
cgcagagttgactcgagtga

SEQ ID NO: 5521 - RNA, 20 nt, synthetic construct
  misc_feature 1..20: note = source = /note="Description of Artificial Sequence: Synthetic oligonucleotide"
  source 1..20: mol_type = other RNA
attatttatgtccactgtcc

SEQ ID NO: 5522 - RNA, 20 nt, synthetic construct
  misc_feature 1..20: note = source = /note="Description of Artificial Sequence: Synthetic oligonucleotide"
  source 1..20: mol_type = other RNA
ttatttatgtccactgtcca

SEQ ID NO: 5523 - RNA, 20 nt, synthetic construct
  misc_feature 1..20: note = source = /note="Description of Artificial Sequence: Synthetic oligonucleotide"
  source 1..20: mol_type = other RNA
tgtccagggtacttgcttta

SEQ ID NO: 5524 - RNA, 20 nt, synthetic construct
  misc_feature 1..20: note = source = /note="Description of Artificial Sequence: Synthetic oligonucleotide"
  source 1..20: mol_type = other RNA
gtccagggtacttgctttaa

SEQ ID NO: 5525 - RNA, 20 nt, synthetic construct
  misc_feature 1..20: note = source = /note="Description of Artificial Sequence: Synthetic oligonucleotide"
  source 1..20: mol_type = other RNA
tcttgaagatgaagagtctt

SEQ ID NO: 5526 - RNA, 20 nt, synthetic construct
  misc_feature 1..20: note = source = /note="Description of Artificial Sequence: Synthetic oligonucleotide"
  source 1..20: mol_type = other RNA
tcctagtgatgtgatcatat

SEQ ID NO: 5527 - RNA, 20 nt, synthetic construct
  misc_feature 1..20: note = source = /note="Description of Artificial Sequence: Synthetic oligonucleotide"
  source 1..20: mol_type = other RNA
aatccagtgtttcttttcca

SEQ ID NO: 5528 - RNA, 20 nt, synthetic construct
  misc_feature 1..20: note = source = /note="Description of Artificial Sequence: Synthetic oligonucleotide"
  source 1..20: mol_type = other RNA
ttccaaggacagtactgata

SEQ ID NO: 5529 - RNA, 20 nt, synthetic construct
  misc_feature 1..20: note = source = /note="Description of Artificial Sequence: Synthetic oligonucleotide"
  source 1..20: mol_type = other RNA
atctccatctattcatagtt

SEQ ID NO: 5530 - RNA, 20 nt, synthetic construct
  misc_feature 1..20: note = source = /note="Description of Artificial Sequence: Synthetic oligonucleotide"
  source 1..20: mol_type = other RNA
tcatagtttggctcagaagt

SEQ ID NO: 5531 - RNA, 20 nt, synthetic construct
  misc_feature 1..20: note = source = /note="Description of Artificial Sequence: Synthetic oligonucleotide"
  source 1..20: mol_type = other RNA
tttggctcagaagttggaca

SEQ ID NO: 5532 - RNA, 20 nt, synthetic construct
  misc_feature 1..20: note = source = /note="Description of Artificial Sequence: Synthetic oligonucleotide"
  source 1..20: mol_type = other RNA
tatctacttcttcctcatgt

SEQ ID NO: 5533 - RNA, 20 nt, synthetic construct
  misc_feature 1..20: note = source = /note="Description of Artificial Sequence: Synthetic oligonucleotide"
  source 1..20: mol_type = other RNA
gtttacttatgtgtaaaatg

SEQ ID NO: 5534 - RNA, 20 nt, synthetic construct
  misc_feature 1..20: note = source = /note="Description of Artificial Sequence: Synthetic oligonucleotide"
  source 1..20: mol_type = other RNA
tacacccttcaaaccgaaag

SEQ ID NO: 5535 - RNA, 20 nt, synthetic construct
  misc_feature 1..20: note = source = /note="Description of Artificial Sequence: Synthetic oligonucleotide"
  source 1..20: mol_type = other RNA
aatttttaaaaattgagatg

SEQ ID NO: 5536 - RNA, 20 nt, synthetic construct
  misc_feature 1..20: note = source = /note="Description of Artificial Sequence: Synthetic oligonucleotide"
  source 1..20: mol_type = other RNA
atttttaaaaattgagatgt

SEQ ID NO: 5537 - RNA, 20 nt, synthetic construct
  misc_feature 1..20: note = source = /note="Description of Artificial Sequence: Synthetic oligonucleotide"
  source 1..20: mol_type = other RNA
tttttaaaaattgagatgtg

SEQ ID NO: 5538 - RNA, 20 nt, synthetic construct
  misc_feature 1..20: note = source = /note="Description of Artificial Sequence: Synthetic oligonucleotide"
  source 1..20: mol_type = other RNA
ttaaaaattgagatgtgggg

SEQ ID NO: 5539 - RNA, 20 nt, synthetic construct
  misc_feature 1..20: note = source = /note="Description of Artificial Sequence: Synthetic oligonucleotide"
  source 1..20: mol_type = other RNA
tgactgtgtctatgtcctgt

SEQ ID NO: 5540 - RNA, 20 nt, synthetic construct
  misc_feature 1..20: note = source = /note="Description of Artificial Sequence: Synthetic oligonucleotide"
  source 1..20: mol_type = other RNA
accatattttatgcaacttc

SEQ ID NO: 5541 - RNA, 20 nt, synthetic construct
  misc_feature 1..20: note = source = /note="Description of Artificial Sequence: Synthetic oligonucleotide"
  source 1..20: mol_type = other RNA
aaaacatgctatataatttt

SEQ ID NO: 5542 - RNA, 20 nt, synthetic construct
  misc_feature 1..20: note = source = /note="Description of Artificial Sequence: Synthetic oligonucleotide"
  source 1..20: mol_type = other RNA
agagtaatcttcatcatgta

SEQ ID NO: 5543 - RNA, 20 nt, synthetic construct
  misc_feature 1..20: note = source = /note="Description of Artificial Sequence: Synthetic oligonucleotide"
  source 1..20: mol_type = other RNA
gagtaatcttcatcatgtat

SEQ ID NO: 5544 - RNA, 20 nt, synthetic construct
  misc_feature 1..20: note = source = /note="Description of Artificial Sequence: Synthetic oligonucleotide"
  source 1..20: mol_type = other RNA
gtatttttctgatgaacaca

SEQ ID NO: 5545 - RNA, 20 nt, synthetic construct
  misc_feature 1..20: note = source = /note="Description of Artificial Sequence: Synthetic oligonucleotide"
  source 1..20: mol_type = other RNA
tactctttcttctgatagac

SEQ ID NO: 5546 - RNA, 20 nt, synthetic construct
  misc_feature 1..20: note = source = /note="Description of Artificial Sequence: Synthetic oligonucleotide"
  source 1..20: mol_type = other RNA
tttatgttatgaaataatgt

SEQ ID NO: 5547 - RNA, 20 nt, synthetic construct
  misc_feature 1..20: note = source = /note="Description of Artificial Sequence: Synthetic oligonucleotide"
  source 1..20: mol_type = other RNA
tttcttaaattgatagctca

SEQ ID NO: 5548 - RNA, 20 nt, synthetic construct
  misc_feature 1..20: note = source = /note="Description of Artificial Sequence: Synthetic oligonucleotide"
  source 1..20: mol_type = other RNA
atagctcatggatgtgcagt

SEQ ID NO: 5549 - RNA, 20 nt, synthetic construct
  misc_feature 1..20: note = source = /note="Description of Artificial Sequence: Synthetic oligonucleotide"
  source 1..20: mol_type = other RNA
tggatgtgcagttggtttaa

SEQ ID NO: 5550 - RNA, 20 nt, synthetic construct
  misc_feature 1..20: note = source = /note="Description of Artificial Sequence: Synthetic oligonucleotide"
  source 1..20: mol_type = other RNA
attgctagttgttccaaaat

SEQ ID NO: 5551 - RNA, 20 nt, synthetic construct
  misc_feature 1..20: note = source = /note="Description of Artificial Sequence: Synthetic oligonucleotide"
  source 1..20: mol_type = other RNA
taaaaatgaccagattgtta

SEQ ID NO: 5552 - RNA, 20 nt, synthetic construct
  misc_feature 1..20: note = source = /note="Description of Artificial Sequence: Synthetic oligonucleotide"
  source 1..20: mol_type = other RNA
ttgattaagactagatcaat

SEQ ID NO: 5553 - RNA, 20 nt, synthetic construct
  misc_feature 1..20: note = source = /note="Description of Artificial Sequence: Synthetic oligonucleotide"
  source 1..20: mol_type = other RNA
aaacttctccaaaacataga

SEQ ID NO: 5554 - RNA, 20 nt, synthetic construct
  misc_feature 1..20: note = source = /note="Description of Artificial Sequence: Synthetic oligonucleotide"
  source 1..20: mol_type = other RNA
catagatggcatgccttttg

SEQ ID NO: 5555 - RNA, 20 nt, synthetic construct
  misc_feature 1..20: note = source = /note="Description of Artificial Sequence: Synthetic oligonucleotide"
  source 1..20: mol_type = other RNA
tggcatgccttttgaggcaa

SEQ ID NO: 5556 - RNA, 20 nt, synthetic construct
  misc_feature 1..20: note = source = /note="Description of Artificial Sequence: Synthetic oligonucleotide"
  source 1..20: mol_type = other RNA
atgccttttgaggcaatggt

SEQ ID NO: 5557 - RNA, 20 nt, synthetic construct
  misc_feature 1..20: note = source = /note="Description of Artificial Sequence: Synthetic oligonucleotide"
  source 1..20: mol_type = other RNA
tgccttttgaggcaatggta

SEQ ID NO: 5558 - RNA, 20 nt, synthetic construct
  misc_feature 1..20: note = source = /note="Description of Artificial Sequence: Synthetic oligonucleotide"
  source 1..20: mol_type = other RNA
ggaacaaaatatttttgaga

SEQ ID NO: 5559 - RNA, 20 nt, synthetic construct
  misc_feature 1..20: note = source = /note="Description of Artificial Sequence: Synthetic oligonucleotide"
  source 1..20: mol_type = other RNA
tttgagaaggagcagatttt

SEQ ID NO: 5560 - RNA, 20 nt, synthetic construct
  misc_feature 1..20: note = source = /note="Description of Artificial Sequence: Synthetic oligonucleotide"
  source 1..20: mol_type = other RNA
ttgagaaggagcagatttta

SEQ ID NO: 5561 - RNA, 20 nt, synthetic construct
  misc_feature 1..20: note = source = /note="Description of Artificial Sequence: Synthetic oligonucleotide"
  source 1..20: mol_type = other RNA
gccaaaatgcttgtgttaca

SEQ ID NO: 5562 - RNA, 20 nt, synthetic construct
  misc_feature 1..20: note = source = /note="Description of Artificial Sequence: Synthetic oligonucleotide"
  source 1..20: mol_type = other RNA
gcttgtgttacaaggattcc

SEQ ID NO: 5563 - RNA, 20 nt, synthetic construct
  misc_feature 1..20: note = source = /note="Description of Artificial Sequence: Synthetic oligonucleotide"
  source 1..20: mol_type = other RNA
gagtttttaaataaaatgct

SEQ ID NO: 5564 - RNA, 20 nt, synthetic construct
  misc_feature 1..20: note = source = /note="Description of Artificial Sequence: Synthetic oligonucleotide"
  source 1..20: mol_type = other RNA
attaatattgtagagtcccc

SEQ ID NO: 5565 - RNA, 20 nt, synthetic construct
  misc_feature 1..20: note = source = /note="Description of Artificial Sequence: Synthetic oligonucleotide"
  source 1..20: mol_type = other RNA
ttaatattgtagagtcccct

SEQ ID NO: 5566 - RNA, 20 nt, synthetic construct
  misc_feature 1..20: note = source = /note="Description of Artificial Sequence: Synthetic oligonucleotide"
  source 1..20: mol_type = other RNA
taatattgtagagtcccctg

SEQ ID NO: 5567 - RNA, 20 nt, synthetic construct
  misc_feature 1..20: note = source = /note="Description of Artificial Sequence: Synthetic oligonucleotide"
  source 1..20: mol_type = other RNA
tctaccttttgatagctttg

SEQ ID NO: 5568 - RNA, 20 nt, synthetic construct
  misc_feature 1..20: note = source = /note="Description of Artificial Sequence: Synthetic oligonucleotide"
  source 1..20: mol_type = other RNA
ctaccttttgatagctttgt

SEQ ID NO: 5569 - RNA, 20 nt, synthetic construct
  misc_feature 1..20: note = source = /note="Description of Artificial Sequence: Synthetic oligonucleotide"
  source 1..20: mol_type = other RNA
taccttttgatagctttgtg

SEQ ID NO: 5570 - RNA, 20 nt, synthetic construct
  misc_feature 1..20: note = source = /note="Description of Artificial Sequence: Synthetic oligonucleotide"
  source 1..20: mol_type = other RNA
gttttgccattcttgatttt

SEQ ID NO: 5571 - RNA, 20 nt, synthetic construct
  misc_feature 1..20: note = source = /note="Description of Artificial Sequence: Synthetic oligonucleotide"
  source 1..20: mol_type = other RNA
ttttgccattcttgatttta

SEQ ID NO: 5572 - RNA, 20 nt, synthetic construct
  misc_feature 1..20: note = source = /note="Description of Artificial Sequence: Synthetic oligonucleotide"
  source 1..20: mol_type = other RNA
tgcattgattaagatcatct

SEQ ID NO: 5573 - RNA, 20 nt, synthetic construct
  misc_feature 1..20: note = source = /note="Description of Artificial Sequence: Synthetic oligonucleotide"
  source 1..20: mol_type = other RNA
ctcattatatagtatttaat

SEQ ID NO: 5574 - RNA, 20 nt, synthetic construct
  misc_feature 1..20: note = source = /note="Description of Artificial Sequence: Synthetic oligonucleotide"
  source 1..20: mol_type = other RNA
tcattatatagtatttaata

SEQ ID NO: 5575 - RNA, 20 nt, synthetic construct
  misc_feature 1..20: note = source = /note="Description of Artificial Sequence: Synthetic oligonucleotide"
  source 1..20: mol_type = other RNA
tttctcctcattagaatatc

SEQ ID NO: 5576 - RNA, 20 nt, synthetic construct
  misc_feature 1..20: note = source = /note="Description of Artificial Sequence: Synthetic oligonucleotide"
  source 1..20: mol_type = other RNA
aatatcaggtccaagaagac

SEQ ID NO: 5577 - RNA, 20 nt, synthetic construct
  misc_feature 1..20: note = source = /note="Description of Artificial Sequence: Synthetic oligonucleotide"
  source 1..20: mol_type = other RNA
tatttatctcttttgttcag

SEQ ID NO: 5578 - RNA, 20 nt, synthetic construct
  misc_feature 1..20: note = source = /note="Description of Artificial Sequence: Synthetic oligonucleotide"
  source 1..20: mol_type = other RNA
tttgttcagtggtgtgttac

SEQ ID NO: 5579 - RNA, 20 nt, synthetic construct
  misc_feature 1..20: note = source = /note="Description of Artificial Sequence: Synthetic oligonucleotide"
  source 1..20: mol_type = other RNA
tattattagaacccatttgt

SEQ ID NO: 5580 - RNA, 20 nt, synthetic construct
  misc_feature 1..20: note = source = /note="Description of Artificial Sequence: Synthetic oligonucleotide"
  source 1..20: mol_type = other RNA
catttgttggccttatgtaa

SEQ ID NO: 5581 - RNA, 20 nt, synthetic construct
  misc_feature 1..20: note = source = /note="Description of Artificial Sequence: Synthetic oligonucleotide"
  source 1..20: mol_type = other RNA
gccttatgtaatggttctat

SEQ ID NO: 5582 - RNA, 20 nt, synthetic construct
  misc_feature 1..20: note = source = /note="Description of Artificial Sequence: Synthetic oligonucleotide"
  source 1..20: mol_type = other RNA
ccattaatgtcttcttgacc

SEQ ID NO: 5583 - RNA, 20 nt, synthetic construct
  misc_feature 1..20: note = source = /note="Description of Artificial Sequence: Synthetic oligonucleotide"
  source 1..20: mol_type = other RNA
ataatttttacagcaccttt

SEQ ID NO: 5584 - RNA, 20 nt, synthetic construct
  misc_feature 1..20: note = source = /note="Description of Artificial Sequence: Synthetic oligonucleotide"
  source 1..20: mol_type = other RNA
cccagcacaaacttaaacac

SEQ ID NO: 5585 - RNA, 20 nt, synthetic construct
  misc_feature 1..20: note = source = /note="Description of Artificial Sequence: Synthetic oligonucleotide"
  source 1..20: mol_type = other RNA
taaacactggctccaaccct

SEQ ID NO: 5586 - RNA, 20 nt, synthetic construct
  misc_feature 1..20: note = source = /note="Description of Artificial Sequence: Synthetic oligonucleotide"
  source 1..20: mol_type = other RNA
caacccttggagttgaaagt

SEQ ID NO: 5587 - RNA, 20 nt, synthetic construct
  misc_feature 1..20: note = source = /note="Description of Artificial Sequence: Synthetic oligonucleotide"
  source 1..20: mol_type = other RNA
aacccttggagttgaaagta

SEQ ID NO: 5588 - RNA, 20 nt, synthetic construct
  misc_feature 1..20: note = source = /note="Description of Artificial Sequence: Synthetic oligonucleotide"
  source 1..20: mol_type = other RNA
acccttggagttgaaagtag

SEQ ID NO: 5589 - RNA, 20 nt, synthetic construct
  misc_feature 1..20: note = source = /note="Description of Artificial Sequence: Synthetic oligonucleotide"
  source 1..20: mol_type = other RNA
taccgtgagcaccagtgcct

SEQ ID NO: 5590 - RNA, 20 nt, synthetic construct
  misc_feature 1..20: note = source = /note="Description of Artificial Sequence: Synthetic oligonucleotide"
  source 1..20: mol_type = other RNA
agcaccagtgcctaggagat

SEQ ID NO: 5591 - RNA, 20 nt, synthetic construct
  misc_feature 1..20: note = source = /note="Description of Artificial Sequence: Synthetic oligonucleotide"
  source 1..20: mol_type = other RNA
gcaccagtgcctaggagatt

SEQ ID NO: 5592 - RNA, 20 nt, synthetic construct
  misc_feature 1..20: note = source = /note="Description of Artificial Sequence: Synthetic oligonucleotide"
  source 1..20: mol_type = other RNA
cagtgcctaggagattgggc

SEQ ID NO: 5593 - RNA, 20 nt, synthetic construct
  misc_feature 1..20: note = source = /note="Description of Artificial Sequence: Synthetic oligonucleotide"
  source 1..20: mol_type = other RNA
taggagattgggcaggactg

SEQ ID NO: 5594 - RNA, 20 nt, synthetic construct
  misc_feature 1..20: note = source = /note="Description of Artificial Sequence: Synthetic oligonucleotide"
  source 1..20: mol_type = other RNA
agattgggcaggactgagga

SEQ ID NO: 5595 - RNA, 20 nt, synthetic construct
  misc_feature 1..20: note = source = /note="Description of Artificial Sequence: Synthetic oligonucleotide"
  source 1..20: mol_type = other RNA
aggactgaggaaggatgaaa

SEQ ID NO: 5596 - RNA, 20 nt, synthetic construct
  misc_feature 1..20: note = source = /note="Description of Artificial Sequence: Synthetic oligonucleotide"
  source 1..20: mol_type = other RNA
ggaaggatgaaaaggagctc

SEQ ID NO: 5597 - RNA, 20 nt, synthetic construct
  misc_feature 1..20: note = source = /note="Description of Artificial Sequence: Synthetic oligonucleotide"
  source 1..20: mol_type = other RNA
gaaggatgaaaaggagctca

SEQ ID NO: 5598 - RNA, 20 nt, synthetic construct
  misc_feature 1..20: note = source = /note="Description of Artificial Sequence: Synthetic oligonucleotide"
  source 1..20: mol_type = other RNA
cttaagcacctgaacaagac

SEQ ID NO: 5599 - RNA, 20 nt, synthetic construct
  misc_feature 1..20: note = source = /note="Description of Artificial Sequence: Synthetic oligonucleotide"
  source 1..20: mol_type = other RNA
aagcacctgaacaagactgg

SEQ ID NO: 5600 - RNA, 20 nt, synthetic construct
  misc_feature 1..20: note = source = /note="Description of Artificial Sequence: Synthetic oligonucleotide"
  source 1..20: mol_type = other RNA
tgaacaagactggaggactt

SEQ ID NO: 5601 - RNA, 20 nt, synthetic construct
  misc_feature 1..20: note = source = /note="Description of Artificial Sequence: Synthetic oligonucleotide"
  source 1..20: mol_type = other RNA
gatgttgctatttttctgcc

SEQ ID NO: 5602 - RNA, 20 nt, synthetic construct
  misc_feature 1..20: note = source = /note="Description of Artificial Sequence: Synthetic oligonucleotide"
  source 1..20: mol_type = other RNA
tttttctgcctggcattgac

SEQ ID NO: 5603 - RNA, 20 nt, synthetic construct
  misc_feature 1..20: note = source = /note="Description of Artificial Sequence: Synthetic oligonucleotide"
  source 1..20: mol_type = other RNA
gcctggcattgactggctat

SEQ ID NO: 5604 - RNA, 20 nt, synthetic construct
  misc_feature 1..20: note = source = /note="Description of Artificial Sequence: Synthetic oligonucleotide"
  source 1..20: mol_type = other RNA
gctattggacgccctctgtg

SEQ ID NO: 5605 - RNA, 20 nt, synthetic construct
  misc_feature 1..20: note = source = /note="Description of Artificial Sequence: Synthetic oligonucleotide"
  source 1..20: mol_type = other RNA
ttggacgccctctgtgaggc

SEQ ID NO: 5606 - RNA, 20 nt, synthetic construct
  misc_feature 1..20: note = source = /note="Description of Artificial Sequence: Synthetic oligonucleotide"
  source 1..20: mol_type = other RNA
tgaggcaggcatccgaatac

SEQ ID NO: 5607 - RNA, 20 nt, synthetic construct
  misc_feature 1..20: note = source = /note="Description of Artificial Sequence: Synthetic oligonucleotide"
  source 1..20: mol_type = other RNA
actggctttcttgacatata

SEQ ID NO: 5608 - RNA, 20 nt, synthetic construct
  misc_feature 1..20: note = source = /note="Description of Artificial Sequence: Synthetic oligonucleotide"
  source 1..20: mol_type = other RNA
atatggagcgttctttagag

SEQ ID NO: 5609 - RNA, 20 nt, synthetic construct
  misc_feature 1..20: note = source = /note="Description of Artificial Sequence: Synthetic oligonucleotide"
  source 1..20: mol_type = other RNA
gttctttagagaggcctaca

SEQ ID NO: 5610 - RNA, 20 nt, synthetic construct
  misc_feature 1..20: note = source = /note="Description of Artificial Sequence: Synthetic oligonucleotide"
  source 1..20: mol_type = other RNA
ttctttagagaggcctacaa

SEQ ID NO: 5611 - RNA, 20 nt, synthetic construct
  misc_feature 1..20: note = source = /note="Description of Artificial Sequence: Synthetic oligonucleotide"
  source 1..20: mol_type = other RNA
tcactgcacagtaccctgat

SEQ ID NO: 5612 - RNA, 20 nt, synthetic construct
  misc_feature 1..20: note = source = /note="Description of Artificial Sequence: Synthetic oligonucleotide"
  source 1..20: mol_type = other RNA
accccacagtctctttctgc

SEQ ID NO: 5613 - RNA, 20 nt, synthetic construct
  misc_feature 1..20: note = source = /note="Description of Artificial Sequence: Synthetic oligonucleotide"
  source 1..20: mol_type = other RNA
ccccacagtctctttctgct

SEQ ID NO: 5614 - RNA, 20 nt, synthetic construct
  misc_feature 1..20: note = source = /note="Description of Artificial Sequence: Synthetic oligonucleotide"
  source 1..20: mol_type = other RNA
cccacagtctctttctgctg

SEQ ID NO: 5615 - RNA, 20 nt, synthetic construct
  misc_feature 1..20: note = source = /note="Description of Artificial Sequence: Synthetic oligonucleotide"
  source 1..20: mol_type = other RNA
ctgctggggcatccttgccc

SEQ ID NO: 5616 - RNA, 20 nt, synthetic construct
  misc_feature 1..20: note = source = /note="Description of Artificial Sequence: Synthetic oligonucleotide"
  source 1..20: mol_type = other RNA
taattgaaagtttcaagcat

SEQ ID NO: 5617 - RNA, 20 nt, synthetic construct
  misc_feature 1..20: note = source = /note="Description of Artificial Sequence: Synthetic oligonucleotide"
  source 1..20: mol_type = other RNA
tcctagacagtgttccagta

SEQ ID NO: 5618 - RNA, 20 nt, synthetic construct
  misc_feature 1..20: note = source = /note="Description of Artificial Sequence: Synthetic oligonucleotide"
  source 1..20: mol_type = other RNA
acaattatccattctaataa

SEQ ID NO: 5619 - RNA, 20 nt, synthetic construct
  misc_feature 1..20: note = source = /note="Description of Artificial Sequence: Synthetic oligonucleotide"
  source 1..20: mol_type = other RNA
caattatccattctaataat

SEQ ID NO: 5620 - RNA, 20 nt, synthetic construct
  misc_feature 1..20: note = source = /note="Description of Artificial Sequence: Synthetic oligonucleotide"
  source 1..20: mol_type = other RNA
tccttcagtacacactagtt

SEQ ID NO: 5621 - RNA, 20 nt, synthetic construct
  misc_feature 1..20: note = source = /note="Description of Artificial Sequence: Synthetic oligonucleotide"
  source 1..20: mol_type = other RNA
cacactagtttggtgagact

SEQ ID NO: 5622 - RNA, 20 nt, synthetic construct
  misc_feature 1..20: note = source = /note="Description of Artificial Sequence: Synthetic oligonucleotide"
  source 1..20: mol_type = other RNA
gtttggtgagacttggagaa

SEQ ID NO: 5623 - RNA, 20 nt, synthetic construct
  misc_feature 1..20: note = source = /note="Description of Artificial Sequence: Synthetic oligonucleotide"
  source 1..20: mol_type = other RNA
gtgagacttggagaaaggcc

SEQ ID NO: 5624 - RNA, 20 nt, synthetic construct
  misc_feature 1..20: note = source = /note="Description of Artificial Sequence: Synthetic oligonucleotide"
  source 1..20: mol_type = other RNA
caaattcaaaaaacaattcc

SEQ ID NO: 5625 - RNA, 20 nt, synthetic construct
  misc_feature 1..20: note = source = /note="Description of Artificial Sequence: Synthetic oligonucleotide"
  source 1..20: mol_type = other RNA
ttccaggattaacagataag

SEQ ID NO: 5626 - RNA, 20 nt, synthetic construct
  misc_feature 1..20: note = source = /note="Description of Artificial Sequence: Synthetic oligonucleotide"
  source 1..20: mol_type = other RNA
tcattttaccaataagaaac

SEQ ID NO: 5627 - RNA, 20 nt, synthetic construct
  misc_feature 1..20: note = source = /note="Description of Artificial Sequence: Synthetic oligonucleotide"
  source 1..20: mol_type = other RNA
tttaccaataagaaactggt

SEQ ID NO: 5628 - RNA, 20 nt, synthetic construct
  misc_feature 1..20: note = source = /note="Description of Artificial Sequence: Synthetic oligonucleotide"
  source 1..20: mol_type = other RNA
aagaaactggttggttaact

SEQ ID NO: 5629 - RNA, 20 nt, synthetic construct
  misc_feature 1..20: note = source = /note="Description of Artificial Sequence: Synthetic oligonucleotide"
  source 1..20: mol_type = other RNA
agaaactggttggttaactt

SEQ ID NO: 5630 - RNA, 20 nt, synthetic construct
  misc_feature 1..20: note = source = /note="Description of Artificial Sequence: Synthetic oligonucleotide"
  source 1..20: mol_type = other RNA
aaagcagatttatactaaac

SEQ ID NO: 5631 - RNA, 20 nt, synthetic construct
  misc_feature 1..20: note = source = /note="Description of Artificial Sequence: Synthetic oligonucleotide"
  source 1..20: mol_type = other RNA
cagatttatactaaactggc

SEQ ID NO: 5632 - RNA, 20 nt, synthetic construct
  misc_feature 1..20: note = source = /note="Description of Artificial Sequence: Synthetic oligonucleotide"
  source 1..20: mol_type = other RNA
aatctgcctctcatcttcaa

SEQ ID NO: 5633 - RNA, 20 nt, synthetic construct
  misc_feature 1..20: note = source = /note="Description of Artificial Sequence: Synthetic oligonucleotide"
  source 1..20: mol_type = other RNA
agattttaaaactttaaaca

SEQ ID NO: 5634 - RNA, 20 nt, synthetic construct
  misc_feature 1..20: note = source = /note="Description of Artificial Sequence: Synthetic oligonucleotide"
  source 1..20: mol_type = other RNA
gattttaaaactttaaacat

SEQ ID NO: 5635 - RNA, 20 nt, synthetic construct
  misc_feature 1..20: note = source = /note="Description of Artificial Sequence: Synthetic oligonucleotide"
  source 1..20: mol_type = other RNA
tttaaacatgggaattaaat

SEQ ID NO: 5636 - RNA, 20 nt, synthetic construct
  misc_feature 1..20: note = source = /note="Description of Artificial Sequence: Synthetic oligonucleotide"
  source 1..20: mol_type = other RNA
gaattaaataggccctactg

SEQ ID NO: 5637 - RNA, 20 nt, synthetic construct
  misc_feature 1..20: note = source = /note="Description of Artificial Sequence: Synthetic oligonucleotide"
  source 1..20: mol_type = other RNA
ctatgcacatgatttagatt

SEQ ID NO: 5638 - RNA, 20 nt, synthetic construct
  misc_feature 1..20: note = source = /note="Description of Artificial Sequence: Synthetic oligonucleotide"
  source 1..20: mol_type = other RNA
aattaacaccttttcagaaa

SEQ ID NO: 5639 - RNA, 20 nt, synthetic construct
  misc_feature 1..20: note = source = /note="Description of Artificial Sequence: Synthetic oligonucleotide"
  source 1..20: mol_type = other RNA
taacaccttttcagaaatgg

SEQ ID NO: 5640 - RNA, 20 nt, synthetic construct
  misc_feature 1..20: note = source = /note="Description of Artificial Sequence: Synthetic oligonucleotide"
  source 1..20: mol_type = other RNA
aaatggaggaactttctctg

SEQ ID NO: 5641 - RNA, 20 nt, synthetic construct
  misc_feature 1..20: note = source = /note="Description of Artificial Sequence: Synthetic oligonucleotide"
  source 1..20: mol_type = other RNA
attattatactttaagtttt

SEQ ID NO: 5642 - RNA, 20 nt, synthetic construct
  misc_feature 1..20: note = source = /note="Description of Artificial Sequence: Synthetic oligonucleotide"
  source 1..20: mol_type = other RNA
ttattatactttaagtttta

SEQ ID NO: 5643 - RNA, 20 nt, synthetic construct
  misc_feature 1..20: note = source = /note="Description of Artificial Sequence: Synthetic oligonucleotide"
  source 1..20: mol_type = other RNA
actttaagttttagggtaca

SEQ ID NO: 5644 - RNA, 20 nt, synthetic construct
  misc_feature 1..20: note = source = /note="Description of Artificial Sequence: Synthetic oligonucleotide"
  source 1..20: mol_type = other RNA
ctttaagttttagggtacat

SEQ ID NO: 5645 - RNA, 20 nt, synthetic construct
  misc_feature 1..20: note = source = /note="Description of Artificial Sequence: Synthetic oligonucleotide"
  source 1..20: mol_type = other RNA
ggtacatgggcacaatgtgc

SEQ ID NO: 5646 - RNA, 20 nt, synthetic construct
  misc_feature 1..20: note = source = /note="Description of Artificial Sequence: Synthetic oligonucleotide"
  source 1..20: mol_type = other RNA
tatgtatacatgtgccatgc

SEQ ID NO: 5647 - RNA, 20 nt, synthetic construct
  misc_feature 1..20: note = source = /note="Description of Artificial Sequence: Synthetic oligonucleotide"
  source 1..20: mol_type = other RNA
ctaactcgtcatctagcatt

SEQ ID NO: 5648 - RNA, 20 nt, synthetic construct
  misc_feature 1..20: note = source = /note="Description of Artificial Sequence: Synthetic oligonucleotide"
  source 1..20: mol_type = other RNA
cacctatgagtgagaatatg

SEQ ID NO: 5649 - RNA, 20 nt, synthetic construct
  misc_feature 1..20: note = source = /note="Description of Artificial Sequence: Synthetic oligonucleotide"
  source 1..20: mol_type = other RNA
gagtgagaatatgcggtgtt

SEQ ID NO: 5650 - RNA, 20 nt, synthetic construct
  misc_feature 1..20: note = source = /note="Description of Artificial Sequence: Synthetic oligonucleotide"
  source 1..20: mol_type = other RNA
tttcatccatgtccctacaa

SEQ ID NO: 5651 - RNA, 20 nt, synthetic construct
  misc_feature 1..20: note = source = /note="Description of Artificial Sequence: Synthetic oligonucleotide"
  source 1..20: mol_type = other RNA
catgaactcatcatttttta

SEQ ID NO: 5652 - RNA, 20 nt, synthetic construct
  misc_feature 1..20: note = source = /note="Description of Artificial Sequence: Synthetic oligonucleotide"
  source 1..20: mol_type = other RNA
tatggctgcatagtattcca

SEQ ID NO: 5653 - RNA, 20 nt, synthetic construct
  misc_feature 1..20: note = source = /note="Description of Artificial Sequence: Synthetic oligonucleotide"
  source 1..20: mol_type = other RNA
ttaatccagtctatcattgt

SEQ ID NO: 5654 - RNA, 20 nt, synthetic construct
  misc_feature 1..20: note = source = /note="Description of Artificial Sequence: Synthetic oligonucleotide"
  source 1..20: mol_type = other RNA
gtctatcattgttggacatt

SEQ ID NO: 5655 - RNA, 20 nt, synthetic construct
  misc_feature 1..20: note = source = /note="Description of Artificial Sequence: Synthetic oligonucleotide"
  source 1..20: mol_type = other RNA
tctatcattgttggacatta

SEQ ID NO: 5656 - RNA, 20 nt, synthetic construct
  misc_feature 1..20: note = source = /note="Description of Artificial Sequence: Synthetic oligonucleotide"
  source 1..20: mol_type = other RNA
tcattgttggacattagggt

SEQ ID NO: 5657 - RNA, 20 nt, synthetic construct
  misc_feature 1..20: note = source = /note="Description of Artificial Sequence: Synthetic oligonucleotide"
  source 1..20: mol_type = other RNA
cagcatgatttatagtcctt

SEQ ID NO: 5658 - RNA, 20 nt, synthetic construct
  misc_feature 1..20: note = source = /note="Description of Artificial Sequence: Synthetic oligonucleotide"
  source 1..20: mol_type = other RNA
agcatgatttatagtccttt

SEQ ID NO: 5659 - RNA, 20 nt, synthetic construct
  misc_feature 1..20: note = source = /note="Description of Artificial Sequence: Synthetic oligonucleotide"
  source 1..20: mol_type = other RNA
tttgggtataaacccagtaa

SEQ ID NO: 5660 - RNA, 20 nt, synthetic construct
  misc_feature 1..20: note = source = /note="Description of Artificial Sequence: Synthetic oligonucleotide"
  source 1..20: mol_type = other RNA
ttgggtataaacccagtaat

SEQ ID NO: 5661 - RNA, 20 nt, synthetic construct
  misc_feature 1..20: note = source = /note="Description of Artificial Sequence: Synthetic oligonucleotide"
  source 1..20: mol_type = other RNA
gtataaacccagtaatggga

SEQ ID NO: 5662 - RNA, 20 nt, synthetic construct
  misc_feature 1..20: note = source = /note="Description of Artificial Sequence: Synthetic oligonucleotide"
  source 1..20: mol_type = other RNA
aatgggatggctcagtcaaa

SEQ ID NO: 5663 - RNA, 20 nt, synthetic construct
  misc_feature 1..20: note = source = /note="Description of Artificial Sequence: Synthetic oligonucleotide"
  source 1..20: mol_type = other RNA
tttctagttctagatccctg

SEQ ID NO: 5664 - RNA, 20 nt, synthetic construct
  misc_feature 1..20: note = source = /note="Description of Artificial Sequence: Synthetic oligonucleotide"
  source 1..20: mol_type = other RNA
cgccacactgacttccacaa

SEQ ID NO: 5665 - RNA, 20 nt, synthetic construct
  misc_feature 1..20: note = source = /note="Description of Artificial Sequence: Synthetic oligonucleotide"
  source 1..20: mol_type = other RNA
ttaatgatcgccattctaac

SEQ ID NO: 5666 - RNA, 20 nt, synthetic construct
  misc_feature 1..20: note = source = /note="Description of Artificial Sequence: Synthetic oligonucleotide"
  source 1..20: mol_type = other RNA
tgtgagatgatatctcattg

SEQ ID NO: 5667 - RNA, 20 nt, synthetic construct
  misc_feature 1..20: note = source = /note="Description of Artificial Sequence: Synthetic oligonucleotide"
  source 1..20: mol_type = other RNA
tttgattttcatttctctga

SEQ ID NO: 5668 - RNA, 20 nt, synthetic construct
  misc_feature 1..20: note = source = /note="Description of Artificial Sequence: Synthetic oligonucleotide"
  source 1..20: mol_type = other RNA
atttctctgatggccagtga

SEQ ID NO: 5669 - RNA, 20 nt, synthetic construct
  misc_feature 1..20: note = source = /note="Description of Artificial Sequence: Synthetic oligonucleotide"
  source 1..20: mol_type = other RNA
gcattttttcatgtgtcttt

SEQ ID NO: 5670 - RNA, 20 nt, synthetic construct
  misc_feature 1..20: note = source = /note="Description of Artificial Sequence: Synthetic oligonucleotide"
  source 1..20: mol_type = other RNA
gtgcttcgcccactttttga

SEQ ID NO: 5671 - RNA, 20 nt, synthetic construct
  misc_feature 1..20: note = source = /note="Description of Artificial Sequence: Synthetic oligonucleotide"
  source 1..20: mol_type = other RNA
tgcttcgcccactttttgat

SEQ ID NO: 5672 - RNA, 20 nt, synthetic construct
  misc_feature 1..20: note = source = /note="Description of Artificial Sequence: Synthetic oligonucleotide"
  source 1..20: mol_type = other RNA
tttgagttctttgtagattc

SEQ ID NO: 5673 - RNA, 20 nt, synthetic construct
  misc_feature 1..20: note = source = /note="Description of Artificial Sequence: Synthetic oligonucleotide"
  source 1..20: mol_type = other RNA
tagccctttgtcagatgagt

SEQ ID NO: 5674 - RNA, 20 nt, synthetic construct
  misc_feature 1..20: note = source = /note="Description of Artificial Sequence: Synthetic oligonucleotide"
  source 1..20: mol_type = other RNA
gaaaattttctgccattttg

SEQ ID NO: 5675 - RNA, 20 nt, synthetic construct
  misc_feature 1..20: note = source = /note="Description of Artificial Sequence: Synthetic oligonucleotide"
  source 1..20: mol_type = other RNA
aaaattttctgccattttgt

SEQ ID NO: 5676 - RNA, 20 nt, synthetic construct
  misc_feature 1..20: note = source = /note="Description of Artificial Sequence: Synthetic oligonucleotide"
  source 1..20: mol_type = other RNA
gggttgcctgttcactctga

SEQ ID NO: 5677 - RNA, 20 nt, synthetic construct
  misc_feature 1..20: note = source = /note="Description of Artificial Sequence: Synthetic oligonucleotide"
  source 1..20: mol_type = other RNA
tagatcccatttgtcaattt

SEQ ID NO: 5678 - RNA, 20 nt, synthetic construct
  misc_feature 1..20: note = source = /note="Description of Artificial Sequence: Synthetic oligonucleotide"
  source 1..20: mol_type = other RNA
gcttttgttgccattgcttt

SEQ ID NO: 5679 - RNA, 20 nt, synthetic construct
  misc_feature 1..20: note = source = /note="Description of Artificial Sequence: Synthetic oligonucleotide"
  source 1..20: mol_type = other RNA
gcccgtgcctatgtcgtgaa

SEQ ID NO: 5680 - RNA, 20 nt, synthetic construct
  misc_feature 1..20: note = source = /note="Description of Artificial Sequence: Synthetic oligonucleotide"
  source 1..20: mol_type = other RNA
tgtcgtgaatggtgttgcct

SEQ ID NO: 5681 - RNA, 20 nt, synthetic construct
  misc_feature 1..20: note = source = /note="Description of Artificial Sequence: Synthetic oligonucleotide"
  source 1..20: mol_type = other RNA
tgttgcctaggttttcttct

SEQ ID NO: 5682 - RNA, 20 nt, synthetic construct
  misc_feature 1..20: note = source = /note="Description of Artificial Sequence: Synthetic oligonucleotide"
  source 1..20: mol_type = other RNA
gttgcctaggttttcttcta

SEQ ID NO: 5683 - RNA, 20 nt, synthetic construct
  misc_feature 1..20: note = source = /note="Description of Artificial Sequence: Synthetic oligonucleotide"
  source 1..20: mol_type = other RNA
gttttcttctagggttttta

SEQ ID NO: 5684 - RNA, 20 nt, synthetic construct
  misc_feature 1..20: note = source = /note="Description of Artificial Sequence: Synthetic oligonucleotide"
  source 1..20: mol_type = other RNA
tctagggtttttatggtttt

SEQ ID NO: 5685 - RNA, 20 nt, synthetic construct
  misc_feature 1..20: note = source = /note="Description of Artificial Sequence: Synthetic oligonucleotide"
  source 1..20: mol_type = other RNA
cttgaattgatttttgtata

SEQ ID NO: 5686 - RNA, 20 nt, synthetic construct
  misc_feature 1..20: note = source = /note="Description of Artificial Sequence: Synthetic oligonucleotide"
  source 1..20: mol_type = other RNA
tgatttttgtataaggtgta

SEQ ID NO: 5687 - RNA, 20 nt, synthetic construct
  misc_feature 1..20: note = source = /note="Description of Artificial Sequence: Synthetic oligonucleotide"
  source 1..20: mol_type = other RNA
ttttgtataaggtgtaagga

SEQ ID NO: 5688 - RNA, 20 nt, synthetic construct
  misc_feature 1..20: note = source = /note="Description of Artificial Sequence: Synthetic oligonucleotide"
  source 1..20: mol_type = other RNA
tttgtataaggtgtaaggaa

SEQ ID NO: 5689 - RNA, 20 nt, synthetic construct
  misc_feature 1..20: note = source = /note="Description of Artificial Sequence: Synthetic oligonucleotide"
  source 1..20: mol_type = other RNA
cagtttcagctttccacata

SEQ ID NO: 5690 - RNA, 20 nt, synthetic construct
  misc_feature 1..20: note = source = /note="Description of Artificial Sequence: Synthetic oligonucleotide"
  source 1..20: mol_type = other RNA
cccagcaccatttattaaat

SEQ ID NO: 5691 - RNA, 20 nt, synthetic construct
  misc_feature 1..20: note = source = /note="Description of Artificial Sequence: Synthetic oligonucleotide"
  source 1..20: mol_type = other RNA
ccagcaccatttattaaata

SEQ ID NO: 5692 - RNA, 20 nt, synthetic construct
  misc_feature 1..20: note = source = /note="Description of Artificial Sequence: Synthetic oligonucleotide"
  source 1..20: mol_type = other RNA
ccccatttcttgtttttctc

SEQ ID NO: 5693 - RNA, 20 nt, synthetic construct
  misc_feature 1..20: note = source = /note="Description of Artificial Sequence: Synthetic oligonucleotide"
  source 1..20: mol_type = other RNA
atcagatagttgtagatatg

SEQ ID NO: 5694 - RNA, 20 nt, synthetic construct
  misc_feature 1..20: note = source = /note="Description of Artificial Sequence: Synthetic oligonucleotide"
  source 1..20: mol_type = other RNA
gatatgtggccttatttctg

SEQ ID NO: 5695 - RNA, 20 nt, synthetic construct
  misc_feature 1..20: note = source = /note="Description of Artificial Sequence: Synthetic oligonucleotide"
  source 1..20: mol_type = other RNA
atatgtggccttatttctga

SEQ ID NO: 5696 - RNA, 20 nt, synthetic construct
  misc_feature 1..20: note = source = /note="Description of Artificial Sequence: Synthetic oligonucleotide"
  source 1..20: mol_type = other RNA
attgatctatatctctgttt

SEQ ID NO: 5697 - RNA, 20 nt, synthetic construct
  misc_feature 1..20: note = source = /note="Description of Artificial Sequence: Synthetic oligonucleotide"
  source 1..20: mol_type = other RNA
tctgttttggtaccagcacc

SEQ ID NO: 5698 - RNA, 20 nt, synthetic construct
  misc_feature 1..20: note = source = /note="Description of Artificial Sequence: Synthetic oligonucleotide"
  source 1..20: mol_type = other RNA
tctccatacttaatccatat

SEQ ID NO: 5699 - RNA, 20 nt, synthetic construct
  misc_feature 1..20: note = source = /note="Description of Artificial Sequence: Synthetic oligonucleotide"
  source 1..20: mol_type = other RNA
tataggaaacattatattcc

SEQ ID NO: 5700 - RNA, 20 nt, synthetic construct
  misc_feature 1..20: note = source = /note="Description of Artificial Sequence: Synthetic oligonucleotide"
  source 1..20: mol_type = other RNA
tatattccaggtctaacatg

SEQ ID NO: 5701 - RNA, 20 nt, synthetic construct
  misc_feature 1..20: note = source = /note="Description of Artificial Sequence: Synthetic oligonucleotide"
  source 1..20: mol_type = other RNA
ctgttgaaaaatatatgttt

SEQ ID NO: 5702 - RNA, 20 nt, synthetic construct
  misc_feature 1..20: note = source = /note="Description of Artificial Sequence: Synthetic oligonucleotide"
  source 1..20: mol_type = other RNA
tttacctcaagagtgagact

SEQ ID NO: 5703 - RNA, 20 nt, synthetic construct
  misc_feature 1..20: note = source = /note="Description of Artificial Sequence: Synthetic oligonucleotide"
  source 1..20: mol_type = other RNA
aattttaaagtcaaacgaaa

SEQ ID NO: 5704 - RNA, 20 nt, synthetic construct
  misc_feature 1..20: note = source = /note="Description of Artificial Sequence: Synthetic oligonucleotide"
  source 1..20: mol_type = other RNA
atttaaactaacattttgct

SEQ ID NO: 5705 - RNA, 20 nt, synthetic construct
  misc_feature 1..20: note = source = /note="Description of Artificial Sequence: Synthetic oligonucleotide"
  source 1..20: mol_type = other RNA
tttaaactaacattttgctc

SEQ ID NO: 5706 - RNA, 20 nt, synthetic construct
  misc_feature 1..20: note = source = /note="Description of Artificial Sequence: Synthetic oligonucleotide"
  source 1..20: mol_type = other RNA
gattttagaacactatacag

SEQ ID NO: 5707 - RNA, 20 nt, synthetic construct
  misc_feature 1..20: note = source = /note="Description of Artificial Sequence: Synthetic oligonucleotide"
  source 1..20: mol_type = other RNA
attttagaacactatacaga

SEQ ID NO: 5708 - RNA, 20 nt, synthetic construct
  misc_feature 1..20: note = source = /note="Description of Artificial Sequence: Synthetic oligonucleotide"
  source 1..20: mol_type = other RNA
aagctatgtcccatgttgat

SEQ ID NO: 5709 - RNA, 20 nt, synthetic construct
  misc_feature 1..20: note = source = /note="Description of Artificial Sequence: Synthetic oligonucleotide"
  source 1..20: mol_type = other RNA
ggaagaatccaaaatagttt

SEQ ID NO: 5710 - RNA, 20 nt, synthetic construct
  misc_feature 1..20: note = source = /note="Description of Artificial Sequence: Synthetic oligonucleotide"
  source 1..20: mol_type = other RNA
gagaataatgccatctatgc

SEQ ID NO: 5711 - RNA, 20 nt, synthetic construct
  misc_feature 1..20: note = source = /note="Description of Artificial Sequence: Synthetic oligonucleotide"
  source 1..20: mol_type = other RNA
aataatgccatctatgcagg

SEQ ID NO: 5712 - RNA, 20 nt, synthetic construct
  misc_feature 1..20: note = source = /note="Description of Artificial Sequence: Synthetic oligonucleotide"
  source 1..20: mol_type = other RNA
tgccatctatgcaggaggtg

SEQ ID NO: 5713 - RNA, 20 nt, synthetic construct
  misc_feature 1..20: note = source = /note="Description of Artificial Sequence: Synthetic oligonucleotide"
  source 1..20: mol_type = other RNA
acactctgaattactaatag

SEQ ID NO: 5714 - RNA, 20 nt, synthetic construct
  misc_feature 1..20: note = source = /note="Description of Artificial Sequence: Synthetic oligonucleotide"
  source 1..20: mol_type = other RNA
atagaggtgaagcctgtcag

SEQ ID NO: 5715 - RNA, 20 nt, synthetic construct
  misc_feature 1..20: note = source = /note="Description of Artificial Sequence: Synthetic oligonucleotide"
  source 1..20: mol_type = other RNA
atctgaatgtataaataaac

SEQ ID NO: 5716 - RNA, 20 nt, synthetic construct
  misc_feature 1..20: note = source = /note="Description of Artificial Sequence: Synthetic oligonucleotide"
  source 1..20: mol_type = other RNA
taaataaacaggattcatga

SEQ ID NO: 5717 - RNA, 20 nt, synthetic construct
  misc_feature 1..20: note = source = /note="Description of Artificial Sequence: Synthetic oligonucleotide"
  source 1..20: mol_type = other RNA
ttatatatacttgtagtatt

SEQ ID NO: 5718 - RNA, 20 nt, synthetic construct
  misc_feature 1..20: note = source = /note="Description of Artificial Sequence: Synthetic oligonucleotide"
  source 1..20: mol_type = other RNA
gacatgcaaaacttatttta

SEQ ID NO: 5719 - RNA, 20 nt, synthetic construct
  misc_feature 1..20: note = source = /note="Description of Artificial Sequence: Synthetic oligonucleotide"
  source 1..20: mol_type = other RNA
taatttactaccttatagta

SEQ ID NO: 5720 - RNA, 20 nt, synthetic construct
  misc_feature 1..20: note = source = /note="Description of Artificial Sequence: Synthetic oligonucleotide"
  source 1..20: mol_type = other RNA
agcatatctacagctttatg

SEQ ID NO: 5721 - RNA, 20 nt, synthetic construct
  misc_feature 1..20: note = source = /note="Description of Artificial Sequence: Synthetic oligonucleotide"
  source 1..20: mol_type = other RNA
gagtaatccgaagagtcaaa

SEQ ID NO: 5722 - RNA, 20 nt, synthetic construct
  misc_feature 1..20: note = source = /note="Description of Artificial Sequence: Synthetic oligonucleotide"
  source 1..20: mol_type = other RNA
atccgaagagtcaaatggta

SEQ ID NO: 5723 - RNA, 20 nt, synthetic construct
  misc_feature 1..20: note = source = /note="Description of Artificial Sequence: Synthetic oligonucleotide"
  source 1..20: mol_type = other RNA
ttacagtcctaaatgcatat

SEQ ID NO: 5724 - RNA, 20 nt, synthetic construct
  misc_feature 1..20: note = source = /note="Description of Artificial Sequence: Synthetic oligonucleotide"
  source 1..20: mol_type = other RNA
gcatcatagcatcttcaaag

SEQ ID NO: 5725 - RNA, 20 nt, synthetic construct
  misc_feature 1..20: note = source = /note="Description of Artificial Sequence: Synthetic oligonucleotide"
  source 1..20: mol_type = other RNA
gaggcctgtcataattatga

SEQ ID NO: 5726 - RNA, 20 nt, synthetic construct
  misc_feature 1..20: note = source = /note="Description of Artificial Sequence: Synthetic oligonucleotide"
  source 1..20: mol_type = other RNA
ataataaattattttcagag

SEQ ID NO: 5727 - RNA, 20 nt, synthetic construct
  misc_feature 1..20: note = source = /note="Description of Artificial Sequence: Synthetic oligonucleotide"
  source 1..20: mol_type = other RNA
ataaattattttcagagagg

SEQ ID NO: 5728 - RNA, 20 nt, synthetic construct
  misc_feature 1..20: note = source = /note="Description of Artificial Sequence: Synthetic oligonucleotide"
  source 1..20: mol_type = other RNA
taaattattttcagagaggc

SEQ ID NO: 5729 - RNA, 20 nt, synthetic construct
  misc_feature 1..20: note = source = /note="Description of Artificial Sequence: Synthetic oligonucleotide"
  source 1..20: mol_type = other RNA
attttcagagaggcgggaga

SEQ ID NO: 5730 - RNA, 20 nt, synthetic construct
  misc_feature 1..20: note = source = /note="Description of Artificial Sequence: Synthetic oligonucleotide"
  source 1..20: mol_type = other RNA
gggagaaggaacaaaatcaa

SEQ ID NO: 5731 - RNA, 20 nt, synthetic construct
  misc_feature 1..20: note = source = /note="Description of Artificial Sequence: Synthetic oligonucleotide"
  source 1..20: mol_type = other RNA
aaatcaaaggaaaactgctg

SEQ ID NO: 5732 - RNA, 20 nt, synthetic construct
  misc_feature 1..20: note = source = /note="Description of Artificial Sequence: Synthetic oligonucleotide"
  source 1..20: mol_type = other RNA
gctgtggctaaaacctgttt

SEQ ID NO: 5733 - RNA, 20 nt, synthetic construct
  misc_feature 1..20: note = source = /note="Description of Artificial Sequence: Synthetic oligonucleotide"
  source 1..20: mol_type = other RNA
ctaaaacctgttttggtctt

SEQ ID NO: 5734 - RNA, 20 nt, synthetic construct
  misc_feature 1..20: note = source = /note="Description of Artificial Sequence: Synthetic oligonucleotide"
  source 1..20: mol_type = other RNA
aatgttagctagtagtcaaa

SEQ ID NO: 5735 - RNA, 20 nt, synthetic construct
  misc_feature 1..20: note = source = /note="Description of Artificial Sequence: Synthetic oligonucleotide"
  source 1..20: mol_type = other RNA
gcctctgacatagaagataa

SEQ ID NO: 5736 - RNA, 20 nt, synthetic construct
  misc_feature 1..20: note = source = /note="Description of Artificial Sequence: Synthetic oligonucleotide"
  source 1..20: mol_type = other RNA
tagcttatgaaaatttattc

SEQ ID NO: 5737 - RNA, 20 nt, synthetic construct
  misc_feature 1..20: note = source = /note="Description of Artificial Sequence: Synthetic oligonucleotide"
  source 1..20: mol_type = other RNA
agcttatgaaaatttattct

SEQ ID NO: 5738 - RNA, 20 nt, synthetic construct
  misc_feature 1..20: note = source = /note="Description of Artificial Sequence: Synthetic oligonucleotide"
  source 1..20: mol_type = other RNA
gcttatgaaaatttattctg

SEQ ID NO: 5739 - RNA, 20 nt, synthetic construct
  misc_feature 1..20: note = source = /note="Description of Artificial Sequence: Synthetic oligonucleotide"
  source 1..20: mol_type = other RNA
cattagctgaaattattgag

SEQ ID NO: 5740 - RNA, 20 nt, synthetic construct
  misc_feature 1..20: note = source = /note="Description of Artificial Sequence: Synthetic oligonucleotide"
  source 1..20: mol_type = other RNA
tctatttatgttaaattgcc

SEQ ID NO: 5741 - RNA, 20 nt, synthetic construct
  misc_feature 1..20: note = source = /note="Description of Artificial Sequence: Synthetic oligonucleotide"
  source 1..20: mol_type = other RNA
tttagaatttctgaaaaaaa

SEQ ID NO: 5742 - RNA, 20 nt, synthetic construct
  misc_feature 1..20: note = source = /note="Description of Artificial Sequence: Synthetic oligonucleotide"
  source 1..20: mol_type = other RNA
agaatttctgaaaaaaatgg

SEQ ID NO: 5743 - RNA, 20 nt, synthetic construct
  misc_feature 1..20: note = source = /note="Description of Artificial Sequence: Synthetic oligonucleotide"
  source 1..20: mol_type = other RNA
gtaaatagaaatattctttt

SEQ ID NO: 5744 - RNA, 20 nt, synthetic construct
  misc_feature 1..20: note = source = /note="Description of Artificial Sequence: Synthetic oligonucleotide"
  source 1..20: mol_type = other RNA
aaatattctttttggttcct

SEQ ID NO: 5745 - RNA, 20 nt, synthetic construct
  misc_feature 1..20: note = source = /note="Description of Artificial Sequence: Synthetic oligonucleotide"
  source 1..20: mol_type = other RNA
tacaaagaacattagattat

SEQ ID NO: 5746 - RNA, 20 nt, synthetic construct
  misc_feature 1..20: note = source = /note="Description of Artificial Sequence: Synthetic oligonucleotide"
  source 1..20: mol_type = other RNA
cattagattattggaataaa

SEQ ID NO: 5747 - RNA, 20 nt, synthetic construct
  misc_feature 1..20: note = source = /note="Description of Artificial Sequence: Synthetic oligonucleotide"
  source 1..20: mol_type = other RNA
gacatacataatatgactag

SEQ ID NO: 5748 - RNA, 20 nt, synthetic construct
  misc_feature 1..20: note = source = /note="Description of Artificial Sequence: Synthetic oligonucleotide"
  source 1..20: mol_type = other RNA
acatacataatatgactagt

SEQ ID NO: 5749 - RNA, 20 nt, synthetic construct
  misc_feature 1..20: note = source = /note="Description of Artificial Sequence: Synthetic oligonucleotide"
  source 1..20: mol_type = other RNA
atttaattagtctgtcattt

SEQ ID NO: 5750 - RNA, 20 nt, synthetic construct
  misc_feature 1..20: note = source = /note="Description of Artificial Sequence: Synthetic oligonucleotide"
  source 1..20: mol_type = other RNA
aattcactttgttgcctttt

SEQ ID NO: 5751 - RNA, 20 nt, synthetic construct
  misc_feature 1..20: note = source = /note="Description of Artificial Sequence: Synthetic oligonucleotide"
  source 1..20: mol_type = other RNA
aacatgccatgtattttcct

SEQ ID NO: 5752 - RNA, 20 nt, synthetic construct
  misc_feature 1..20: note = source = /note="Description of Artificial Sequence: Synthetic oligonucleotide"
  source 1..20: mol_type = other RNA
ccatgtattttcctaggtta

SEQ ID NO: 5753 - RNA, 20 nt, synthetic construct
  misc_feature 1..20: note = source = /note="Description of Artificial Sequence: Synthetic oligonucleotide"
  source 1..20: mol_type = other RNA
catgtattttcctaggttaa

SEQ ID NO: 5754 - RNA, 20 nt, synthetic construct
  misc_feature 1..20: note = source = /note="Description of Artificial Sequence: Synthetic oligonucleotide"
  source 1..20: mol_type = other RNA
cgctctatgagttttttatg

SEQ ID NO: 5755 - RNA, 20 nt, synthetic construct
  misc_feature 1..20: note = source = /note="Description of Artificial Sequence: Synthetic oligonucleotide"
  source 1..20: mol_type = other RNA
actgatgcacatttctcctt

SEQ ID NO: 5756 - RNA, 20 nt, synthetic construct
  misc_feature 1..20: note = source = /note="Description of Artificial Sequence: Synthetic oligonucleotide"
  source 1..20: mol_type = other RNA
cacatttctccttaggtcac

SEQ ID NO: 5757 - RNA, 20 nt, synthetic construct
  misc_feature 1..20: note = source = /note="Description of Artificial Sequence: Synthetic oligonucleotide"
  source 1..20: mol_type = other RNA
tcctccctcagcaatgttgt

SEQ ID NO: 5758 - RNA, 20 nt, synthetic construct
  misc_feature 1..20: note = source = /note="Description of Artificial Sequence: Synthetic oligonucleotide"
  source 1..20: mol_type = other RNA
agtgtttttctctcatacta

SEQ ID NO: 5759 - RNA, 20 nt, synthetic construct
  misc_feature 1..20: note = source = /note="Description of Artificial Sequence: Synthetic oligonucleotide"
  source 1..20: mol_type = other RNA
taaattttacaagagtgact

SEQ ID NO: 5760 - RNA, 20 nt, synthetic construct
  misc_feature 1..20: note = source = /note="Description of Artificial Sequence: Synthetic oligonucleotide"
  source 1..20: mol_type = other RNA
aaattttacaagagtgactt

SEQ ID NO: 5761 - RNA, 20 nt, synthetic construct
  misc_feature 1..20: note = source = /note="Description of Artificial Sequence: Synthetic oligonucleotide"
  source 1..20: mol_type = other RNA
ttttacaagagtgacttggg

SEQ ID NO: 5762 - RNA, 20 nt, synthetic construct
  misc_feature 1..20: note = source = /note="Description of Artificial Sequence: Synthetic oligonucleotide"
  source 1..20: mol_type = other RNA
gctgatatgcccacattgac

SEQ ID NO: 5763 - RNA, 20 nt, synthetic construct
  misc_feature 1..20: note = source = /note="Description of Artificial Sequence: Synthetic oligonucleotide"
  source 1..20: mol_type = other RNA
ctgatatgcccacattgaca

SEQ ID NO: 5764 - RNA, 20 nt, synthetic construct
  misc_feature 1..20: note = source = /note="Description of Artificial Sequence: Synthetic oligonucleotide"
  source 1..20: mol_type = other RNA
tcccctctcctgtattccca

SEQ ID NO: 5765 - RNA, 20 nt, synthetic construct
  misc_feature 1..20: note = source = /note="Description of Artificial Sequence: Synthetic oligonucleotide"
  source 1..20: mol_type = other RNA
cctcaacataaccacagttc

SEQ ID NO: 5766 - RNA, 20 nt, synthetic construct
  misc_feature 1..20: note = source = /note="Description of Artificial Sequence: Synthetic oligonucleotide"
  source 1..20: mol_type = other RNA
ctcaacataaccacagttca

SEQ ID NO: 5767 - RNA, 20 nt, synthetic construct
  misc_feature 1..20: note = source = /note="Description of Artificial Sequence: Synthetic oligonucleotide"
  source 1..20: mol_type = other RNA
accacagttcagggcagtag

SEQ ID NO: 5768 - RNA, 20 nt, synthetic construct
  misc_feature 1..20: note = source = /note="Description of Artificial Sequence: Synthetic oligonucleotide"
  source 1..20: mol_type = other RNA
tttgtgttagctccatgcca

SEQ ID NO: 5769 - RNA, 20 nt, synthetic construct
  misc_feature 1..20: note = source = /note="Description of Artificial Sequence: Synthetic oligonucleotide"
  source 1..20: mol_type = other RNA
catggcaactgcactgagtg

SEQ ID NO: 5770 - RNA, 20 nt, synthetic construct
  misc_feature 1..20: note = source = /note="Description of Artificial Sequence: Synthetic oligonucleotide"
  source 1..20: mol_type = other RNA
aggattcaactcagtgcagc

SEQ ID NO: 5771 - RNA, 20 nt, synthetic construct
  misc_feature 1..20: note = source = /note="Description of Artificial Sequence: Synthetic oligonucleotide"
  source 1..20: mol_type = other RNA
attctctgagtgacattatc

SEQ ID NO: 5772 - RNA, 20 nt, synthetic construct
  misc_feature 1..20: note = source = /note="Description of Artificial Sequence: Synthetic oligonucleotide"
  source 1..20: mol_type = other RNA
ttctctgagtgacattatca

SEQ ID NO: 5773 - RNA, 20 nt, synthetic construct
  misc_feature 1..20: note = source = /note="Description of Artificial Sequence: Synthetic oligonucleotide"
  source 1..20: mol_type = other RNA
tctctgagtgacattatcag

SEQ ID NO: 5774 - RNA, 20 nt, synthetic construct
  misc_feature 1..20: note = source = /note="Description of Artificial Sequence: Synthetic oligonucleotide"
  source 1..20: mol_type = other RNA
ccagcattgcaaagataatc

SEQ ID NO: 5775 - RNA, 20 nt, synthetic construct
  misc_feature 1..20: note = source = /note="Description of Artificial Sequence: Synthetic oligonucleotide"
  source 1..20: mol_type = other RNA
cagcattgcaaagataatct

SEQ ID NO: 5776 - RNA, 20 nt, synthetic construct
  misc_feature 1..20: note = source = /note="Description of Artificial Sequence: Synthetic oligonucleotide"
  source 1..20: mol_type = other RNA
attgcaaagataatctggga

SEQ ID NO: 5777 - RNA, 20 nt, synthetic construct
  misc_feature 1..20: note = source = /note="Description of Artificial Sequence: Synthetic oligonucleotide"
  source 1..20: mol_type = other RNA
gcaaagataatctgggaagg

SEQ ID NO: 5778 - RNA, 20 nt, synthetic construct
  misc_feature 1..20: note = source = /note="Description of Artificial Sequence: Synthetic oligonucleotide"
  source 1..20: mol_type = other RNA
atctgggaaggtggcaaaga

SEQ ID NO: 5779 - RNA, 20 nt, synthetic construct
  misc_feature 1..20: note = source = /note="Description of Artificial Sequence: Synthetic oligonucleotide"
  source 1..20: mol_type = other RNA
tctgggaaggtggcaaagaa

SEQ ID NO: 5780 - RNA, 20 nt, synthetic construct
  misc_feature 1..20: note = source = /note="Description of Artificial Sequence: Synthetic oligonucleotide"
  source 1..20: mol_type = other RNA
aagggatcagaataactctg

SEQ ID NO: 5781 - RNA, 20 nt, synthetic construct
  misc_feature 1..20: note = source = /note="Description of Artificial Sequence: Synthetic oligonucleotide"
  source 1..20: mol_type = other RNA
cacataaagaaatgatttgt

SEQ ID NO: 5782 - RNA, 20 nt, synthetic construct
  misc_feature 1..20: note = source = /note="Description of Artificial Sequence: Synthetic oligonucleotide"
  source 1..20: mol_type = other RNA
aaaaaaaaagcttaaattgt

SEQ ID NO: 5783 - RNA, 20 nt, synthetic construct
  misc_feature 1..20: note = source = /note="Description of Artificial Sequence: Synthetic oligonucleotide"
  source 1..20: mol_type = other RNA
gcacttgtcttagtattgtg

SEQ ID NO: 5784 - RNA, 20 nt, synthetic construct
  misc_feature 1..20: note = source = /note="Description of Artificial Sequence: Synthetic oligonucleotide"
  source 1..20: mol_type = other RNA
cttgtcttagtattgtgtgg

SEQ ID NO: 5785 - RNA, 20 nt, synthetic construct
  misc_feature 1..20: note = source = /note="Description of Artificial Sequence: Synthetic oligonucleotide"
  source 1..20: mol_type = other RNA
ttgtcttagtattgtgtggt

SEQ ID NO: 5786 - RNA, 20 nt, synthetic construct
  misc_feature 1..20: note = source = /note="Description of Artificial Sequence: Synthetic oligonucleotide"
  source 1..20: mol_type = other RNA
agagagctgccagagtgctt

SEQ ID NO: 5787 - RNA, 20 nt, synthetic construct
  misc_feature 1..20: note = source = /note="Description of Artificial Sequence: Synthetic oligonucleotide"
  source 1..20: mol_type = other RNA
gtgcttaggcctagtccctg

SEQ ID NO: 5788 - RNA, 20 nt, synthetic construct
  misc_feature 1..20: note = source = /note="Description of Artificial Sequence: Synthetic oligonucleotide"
  source 1..20: mol_type = other RNA
tgcttaggcctagtccctgt

SEQ ID NO: 5789 - RNA, 20 nt, synthetic construct
  misc_feature 1..20: note = source = /note="Description of Artificial Sequence: Synthetic oligonucleotide"
  source 1..20: mol_type = other RNA
ccctgtgggagcctctgttt

SEQ ID NO: 5790 - RNA, 20 nt, synthetic construct
  misc_feature 1..20: note = source = /note="Description of Artificial Sequence: Synthetic oligonucleotide"
  source 1..20: mol_type = other RNA
tctgttttggtgcttcacca

SEQ ID NO: 5791 - RNA, 20 nt, synthetic construct
  misc_feature 1..20: note = source = /note="Description of Artificial Sequence: Synthetic oligonucleotide"
  source 1..20: mol_type = other RNA
ctgttttggtgcttcaccat

SEQ ID NO: 5792 - RNA, 20 nt, synthetic construct
  misc_feature 1..20: note = source = /note="Description of Artificial Sequence: Synthetic oligonucleotide"
  source 1..20: mol_type = other RNA
acatctttaaaatgagaaaa

SEQ ID NO: 5793 - RNA, 20 nt, synthetic construct
  misc_feature 1..20: note = source = /note="Description of Artificial Sequence: Synthetic oligonucleotide"
  source 1..20: mol_type = other RNA
tgaaatgtttatacattgtt

SEQ ID NO: 5794 - RNA, 20 nt, synthetic construct
  misc_feature 1..20: note = source = /note="Description of Artificial Sequence: Synthetic oligonucleotide"
  source 1..20: mol_type = other RNA
aatttcttagccgtgtgata

SEQ ID NO: 5795 - RNA, 20 nt, synthetic construct
  misc_feature 1..20: note = source = /note="Description of Artificial Sequence: Synthetic oligonucleotide"
  source 1..20: mol_type = other RNA
cttagccgtgtgatatggtt

SEQ ID NO: 5796 - RNA, 20 nt, synthetic construct
  misc_feature 1..20: note = source = /note="Description of Artificial Sequence: Synthetic oligonucleotide"
  source 1..20: mol_type = other RNA
gtgtgatatggtttggttgt

SEQ ID NO: 5797 - RNA, 20 nt, synthetic construct
  misc_feature 1..20: note = source = /note="Description of Artificial Sequence: Synthetic oligonucleotide"
  source 1..20: mol_type = other RNA
tgaaatataatccccagtgt

SEQ ID NO: 5798 - RNA, 20 nt, synthetic construct
  misc_feature 1..20: note = source = /note="Description of Artificial Sequence: Synthetic oligonucleotide"
  source 1..20: mol_type = other RNA
aatataatccccagtgttgg

SEQ ID NO: 5799 - RNA, 20 nt, synthetic construct
  misc_feature 1..20: note = source = /note="Description of Artificial Sequence: Synthetic oligonucleotide"
  source 1..20: mol_type = other RNA
ataatccccagtgttggagg

SEQ ID NO: 5800 - RNA, 20 nt, synthetic construct
  misc_feature 1..20: note = source = /note="Description of Artificial Sequence: Synthetic oligonucleotide"
  source 1..20: mol_type = other RNA
taatccccagtgttggaggt

SEQ ID NO: 5801 - RNA, 20 nt, synthetic construct
  misc_feature 1..20: note = source = /note="Description of Artificial Sequence: Synthetic oligonucleotide"
  source 1..20: mol_type = other RNA
aatccccagtgttggaggtg

SEQ ID NO: 5802 - RNA, 20 nt, synthetic construct
  misc_feature 1..20: note = source = /note="Description of Artificial Sequence: Synthetic oligonucleotide"
  source 1..20: mol_type = other RNA
atccccagtgttggaggtgg

SEQ ID NO: 5803 - RNA, 20 nt, synthetic construct
  misc_feature 1..20: note = source = /note="Description of Artificial Sequence: Synthetic oligonucleotide"
  source 1..20: mol_type = other RNA
cagtgttggaggtgggggcc

SEQ ID NO: 5804 - RNA, 20 nt, synthetic construct
  misc_feature 1..20: note = source = /note="Description of Artificial Sequence: Synthetic oligonucleotide"
  source 1..20: mol_type = other RNA
tgttggaggtgggggcctgg

SEQ ID NO: 5805 - RNA, 20 nt, synthetic construct
  misc_feature 1..20: note = source = /note="Description of Artificial Sequence: Synthetic oligonucleotide"
  source 1..20: mol_type = other RNA
gttggaggtgggggcctggt

SEQ ID NO: 5806 - RNA, 20 nt, synthetic construct
  misc_feature 1..20: note = source = /note="Description of Artificial Sequence: Synthetic oligonucleotide"
  source 1..20: mol_type = other RNA
ggggcctggtgggaagtgtt

SEQ ID NO: 5807 - RNA, 20 nt, synthetic construct
  misc_feature 1..20: note = source = /note="Description of Artificial Sequence: Synthetic oligonucleotide"
  source 1..20: mol_type = other RNA
gtgggaagtgtttggattat

SEQ ID NO: 5808 - RNA, 20 nt, synthetic construct
  misc_feature 1..20: note = source = /note="Description of Artificial Sequence: Synthetic oligonucleotide"
  source 1..20: mol_type = other RNA
tgggaagtgtttggattatt

SEQ ID NO: 5809 - RNA, 20 nt, synthetic construct
  misc_feature 1..20: note = source = /note="Description of Artificial Sequence: Synthetic oligonucleotide"
  source 1..20: mol_type = other RNA
gggaagtgtttggattattg

SEQ ID NO: 5810 - RNA, 20 nt, synthetic construct
  misc_feature 1..20: note = source = /note="Description of Artificial Sequence: Synthetic oligonucleotide"
  source 1..20: mol_type = other RNA
ttattggggcagatccctca

SEQ ID NO: 5811 - RNA, 20 nt, synthetic construct
  misc_feature 1..20: note = source = /note="Description of Artificial Sequence: Synthetic oligonucleotide"
  source 1..20: mol_type = other RNA
ggggcagatccctcatggca

SEQ ID NO: 5812 - RNA, 20 nt, synthetic construct
  misc_feature 1..20: note = source = /note="Description of Artificial Sequence: Synthetic oligonucleotide"
  source 1..20: mol_type = other RNA
tagtgagttctcaagagatc

SEQ ID NO: 5813 - RNA, 20 nt, synthetic construct
  misc_feature 1..20: note = source = /note="Description of Artificial Sequence: Synthetic oligonucleotide"
  source 1..20: mol_type = other RNA
gttctcaagagatctggtta

SEQ ID NO: 5814 - RNA, 20 nt, synthetic construct
  misc_feature 1..20: note = source = /note="Description of Artificial Sequence: Synthetic oligonucleotide"
  source 1..20: mol_type = other RNA
ttctcaagagatctggttaa

SEQ ID NO: 5815 - RNA, 20 nt, synthetic construct
  misc_feature 1..20: note = source = /note="Description of Artificial Sequence: Synthetic oligonucleotide"
  source 1..20: mol_type = other RNA
gagatctggttaagggtgtg

SEQ ID NO: 5816 - RNA, 20 nt, synthetic construct
  misc_feature 1..20: note = source = /note="Description of Artificial Sequence: Synthetic oligonucleotide"
  source 1..20: mol_type = other RNA
ccatgattataagttttgta

SEQ ID NO: 5817 - RNA, 20 nt, synthetic construct
  misc_feature 1..20: note = source = /note="Description of Artificial Sequence: Synthetic oligonucleotide"
  source 1..20: mol_type = other RNA
agcctaacatacctttcaaa

SEQ ID NO: 5818 - RNA, 20 nt, synthetic construct
  misc_feature 1..20: note = source = /note="Description of Artificial Sequence: Synthetic oligonucleotide"
  source 1..20: mol_type = other RNA
gatctctttgtccagaattc

SEQ ID NO: 5819 - RNA, 20 nt, synthetic construct
  misc_feature 1..20: note = source = /note="Description of Artificial Sequence: Synthetic oligonucleotide"
  source 1..20: mol_type = other RNA
ataaagatgccaaaataata

SEQ ID NO: 5820 - RNA, 20 nt, synthetic construct
  misc_feature 1..20: note = source = /note="Description of Artificial Sequence: Synthetic oligonucleotide"
  source 1..20: mol_type = other RNA
tatggcatgtatttgatctc

SEQ ID NO: 5821 - RNA, 20 nt, synthetic construct
  misc_feature 1..20: note = source = /note="Description of Artificial Sequence: Synthetic oligonucleotide"
  source 1..20: mol_type = other RNA
atggcatgtatttgatctca

SEQ ID NO: 5822 - RNA, 20 nt, synthetic construct
  misc_feature 1..20: note = source = /note="Description of Artificial Sequence: Synthetic oligonucleotide"
  source 1..20: mol_type = other RNA
ggaattttcattttttcaaa

SEQ ID NO: 5823 - RNA, 20 nt, synthetic construct
  misc_feature 1..20: note = source = /note="Description of Artificial Sequence: Synthetic oligonucleotide"
  source 1..20: mol_type = other RNA
attttcattttttcaaaagg

SEQ ID NO: 5824 - RNA, 20 nt, synthetic construct
  misc_feature 1..20: note = source = /note="Description of Artificial Sequence: Synthetic oligonucleotide"
  source 1..20: mol_type = other RNA
aatataattttttaatattt

SEQ ID NO: 5825 - RNA, 20 nt, synthetic construct
  misc_feature 1..20: note = source = /note="Description of Artificial Sequence: Synthetic oligonucleotide"
  source 1..20: mol_type = other RNA
gagcacattgtgaaactttc

SEQ ID NO: 5826 - RNA, 20 nt, synthetic construct
  misc_feature 1..20: note = source = /note="Description of Artificial Sequence: Synthetic oligonucleotide"
  source 1..20: mol_type = other RNA
tcaggaattgcatgagctgt

SEQ ID NO: 5827 - RNA, 20 nt, synthetic construct
  misc_feature 1..20: note = source = /note="Description of Artificial Sequence: Synthetic oligonucleotide"
  source 1..20: mol_type = other RNA
acccataagagcatctcctg

SEQ ID NO: 5828 - RNA, 20 nt, synthetic construct
  misc_feature 1..20: note = source = /note="Description of Artificial Sequence: Synthetic oligonucleotide"
  source 1..20: mol_type = other RNA
gacatcatgaaaatcatccc

SEQ ID NO: 5829 - RNA, 20 nt, synthetic construct
  misc_feature 1..20: note = source = /note="Description of Artificial Sequence: Synthetic oligonucleotide"
  source 1..20: mol_type = other RNA
acatcatgaaaatcatccct

SEQ ID NO: 5830 - RNA, 20 nt, synthetic construct
  misc_feature 1..20: note = source = /note="Description of Artificial Sequence: Synthetic oligonucleotide"
  source 1..20: mol_type = other RNA
ggtaaacaattagtcactcc

SEQ ID NO: 5831 - RNA, 20 nt, synthetic construct
  misc_feature 1..20: note = source = /note="Description of Artificial Sequence: Synthetic oligonucleotide"
  source 1..20: mol_type = other RNA
gtcactccaggttttcccaa

SEQ ID NO: 5832 - RNA, 20 nt, synthetic construct
  misc_feature 1..20: note = source = /note="Description of Artificial Sequence: Synthetic oligonucleotide"
  source 1..20: mol_type = other RNA
cagtttaacaaccccaaaaa

SEQ ID NO: 5833 - RNA, 20 nt, synthetic construct
  misc_feature 1..20: note = source = /note="Description of Artificial Sequence: Synthetic oligonucleotide"
  source 1..20: mol_type = other RNA
aaaaaggccttaattttgat

SEQ ID NO: 5834 - RNA, 20 nt, synthetic construct
  misc_feature 1..20: note = source = /note="Description of Artificial Sequence: Synthetic oligonucleotide"
  source 1..20: mol_type = other RNA
tgattggccagcatcctctt

SEQ ID NO: 5835 - RNA, 20 nt, synthetic construct
  misc_feature 1..20: note = source = /note="Description of Artificial Sequence: Synthetic oligonucleotide"
  source 1..20: mol_type = other RNA
aataagaattgtttccatct

SEQ ID NO: 5836 - RNA, 20 nt, synthetic construct
  misc_feature 1..20: note = source = /note="Description of Artificial Sequence: Synthetic oligonucleotide"
  source 1..20: mol_type = other RNA
ataagaattgtttccatcta

SEQ ID NO: 5837 - RNA, 20 nt, synthetic construct
  misc_feature 1..20: note = source = /note="Description of Artificial Sequence: Synthetic oligonucleotide"
  source 1..20: mol_type = other RNA
atctagggaatgatttttat

SEQ ID NO: 5838 - RNA, 20 nt, synthetic construct
  misc_feature 1..20: note = source = /note="Description of Artificial Sequence: Synthetic oligonucleotide"
  source 1..20: mol_type = other RNA
tttataggtagaatcttatt

SEQ ID NO: 5839 - RNA, 20 nt, synthetic construct
  misc_feature 1..20: note = source = /note="Description of Artificial Sequence: Synthetic oligonucleotide"
  source 1..20: mol_type = other RNA
aggtagaatcttatttggca

SEQ ID NO: 5840 - RNA, 20 nt, synthetic construct
  misc_feature 1..20: note = source = /note="Description of Artificial Sequence: Synthetic oligonucleotide"
  source 1..20: mol_type = other RNA
tgtgtagaccttcaatagca

SEQ ID NO: 5841 - RNA, 20 nt, synthetic construct
  misc_feature 1..20: note = source = /note="Description of Artificial Sequence: Synthetic oligonucleotide"
  source 1..20: mol_type = other RNA
catattaattttgtgttctc

SEQ ID NO: 5842 - RNA, 20 nt, synthetic construct
  misc_feature 1..20: note = source = /note="Description of Artificial Sequence: Synthetic oligonucleotide"
  source 1..20: mol_type = other RNA
ctggtgtaagaaaaaataga

SEQ ID NO: 5843 - RNA, 20 nt, synthetic construct
  misc_feature 1..20: note = source = /note="Description of Artificial Sequence: Synthetic oligonucleotide"
  source 1..20: mol_type = other RNA
ctctactttcactgaatagc

SEQ ID NO: 5844 - RNA, 20 nt, synthetic construct
  misc_feature 1..20: note = source = /note="Description of Artificial Sequence: Synthetic oligonucleotide"
  source 1..20: mol_type = other RNA
ctgaatagcaggtgaatagc

SEQ ID NO: 5845 - RNA, 20 nt, synthetic construct
  misc_feature 1..20: note = source = /note="Description of Artificial Sequence: Synthetic oligonucleotide"
  source 1..20: mol_type = other RNA
ctacaatgagcaaaatgcat

SEQ ID NO: 5846 - RNA, 20 nt, synthetic construct
  misc_feature 1..20: note = source = /note="Description of Artificial Sequence: Synthetic oligonucleotide"
  source 1..20: mol_type = other RNA
ttgaaagagtactgtgcaag

SEQ ID NO: 5847 - RNA, 20 nt, synthetic construct
  misc_feature 1..20: note = source = /note="Description of Artificial Sequence: Synthetic oligonucleotide"
  source 1..20: mol_type = other RNA
tgaaagagtactgtgcaagt

SEQ ID NO: 5848 - RNA, 20 nt, synthetic construct
  misc_feature 1..20: note = source = /note="Description of Artificial Sequence: Synthetic oligonucleotide"
  source 1..20: mol_type = other RNA
gtactgtgcaagtgggttac

SEQ ID NO: 5849 - RNA, 20 nt, synthetic construct
  misc_feature 1..20: note = source = /note="Description of Artificial Sequence: Synthetic oligonucleotide"
  source 1..20: mol_type = other RNA
ttactggatcataatattcc

SEQ ID NO: 5850 - RNA, 20 nt, synthetic construct
  misc_feature 1..20: note = source = /note="Description of Artificial Sequence: Synthetic oligonucleotide"
  source 1..20: mol_type = other RNA
tactggatcataatattcca

SEQ ID NO: 5851 - RNA, 20 nt, synthetic construct
  misc_feature 1..20: note = source = /note="Description of Artificial Sequence: Synthetic oligonucleotide"
  source 1..20: mol_type = other RNA
gcatttttctccttctaaaa

SEQ ID NO: 5852 - RNA, 20 nt, synthetic construct
  misc_feature 1..20: note = source = /note="Description of Artificial Sequence: Synthetic oligonucleotide"
  source 1..20: mol_type = other RNA
cattaaacttttcacacaaa

SEQ ID NO: 5853 - RNA, 20 nt, synthetic construct
  misc_feature 1..20: note = source = /note="Description of Artificial Sequence: Synthetic oligonucleotide"
  source 1..20: mol_type = other RNA
tcacacaaatggttgtataa

SEQ ID NO: 5854 - RNA, 20 nt, synthetic construct
  misc_feature 1..20: note = source = /note="Description of Artificial Sequence: Synthetic oligonucleotide"
  source 1..20: mol_type = other RNA
ttctgtataatgtttaaaaa

SEQ ID NO: 5855 - RNA, 20 nt, synthetic construct
  misc_feature 1..20: note = source = /note="Description of Artificial Sequence: Synthetic oligonucleotide"
  source 1..20: mol_type = other RNA
gtagctattattatactcaa

SEQ ID NO: 5856 - RNA, 20 nt, synthetic construct
  misc_feature 1..20: note = source = /note="Description of Artificial Sequence: Synthetic oligonucleotide"
  source 1..20: mol_type = other RNA
aaagaatgtccaaaattatg

SEQ ID NO: 5857 - RNA, 20 nt, synthetic construct
  misc_feature 1..20: note = source = /note="Description of Artificial Sequence: Synthetic oligonucleotide"
  source 1..20: mol_type = other RNA
atgtccaaaattatgtggaa

SEQ ID NO: 5858 - RNA, 20 nt, synthetic construct
  misc_feature 1..20: note = source = /note="Description of Artificial Sequence: Synthetic oligonucleotide"
  source 1..20: mol_type = other RNA
tgattgctctgtatatgaat

SEQ ID NO: 5859 - RNA, 20 nt, synthetic construct
  misc_feature 1..20: note = source = /note="Description of Artificial Sequence: Synthetic oligonucleotide"
  source 1..20: mol_type = other RNA
aaaagaaaagtgcctttttt

SEQ ID NO: 5860 - RNA, 20 nt, synthetic construct
  misc_feature 1..20: note = source = /note="Description of Artificial Sequence: Synthetic oligonucleotide"
  source 1..20: mol_type = other RNA
tgcctttttttggtagtatc

SEQ ID NO: 5861 - RNA, 20 nt, synthetic construct
  misc_feature 1..20: note = source = /note="Description of Artificial Sequence: Synthetic oligonucleotide"
  source 1..20: mol_type = other RNA
ttttttggtagtatctggac

SEQ ID NO: 5862 - RNA, 20 nt, synthetic construct
  misc_feature 1..20: note = source = /note="Description of Artificial Sequence: Synthetic oligonucleotide"
  source 1..20: mol_type = other RNA
gtaattgactttctttctgc

SEQ ID NO: 5863 - RNA, 20 nt, synthetic construct
  misc_feature 1..20: note = source = /note="Description of Artificial Sequence: Synthetic oligonucleotide"
  source 1..20: mol_type = other RNA
aagtgatagtgtcctgattt

SEQ ID NO: 5864 - RNA, 20 nt, synthetic construct
  misc_feature 1..20: note = source = /note="Description of Artificial Sequence: Synthetic oligonucleotide"
  source 1..20: mol_type = other RNA
aaacctaaagtttctttatt

SEQ ID NO: 5865 - RNA, 20 nt, synthetic construct
  misc_feature 1..20: note = source = /note="Description of Artificial Sequence: Synthetic oligonucleotide"
  source 1..20: mol_type = other RNA
gaaacataatgtaagccaca

SEQ ID NO: 5866 - RNA, 20 nt, synthetic construct
  misc_feature 1..20: note = source = /note="Description of Artificial Sequence: Synthetic oligonucleotide"
  source 1..20: mol_type = other RNA
atagataccacatctcaatt

SEQ ID NO: 5867 - RNA, 20 nt, synthetic construct
  misc_feature 1..20: note = source = /note="Description of Artificial Sequence: Synthetic oligonucleotide"
  source 1..20: mol_type = other RNA
tttggactagacacatttta

SEQ ID NO: 5868 - RNA, 20 nt, synthetic construct
  misc_feature 1..20: note = source = /note="Description of Artificial Sequence: Synthetic oligonucleotide"
  source 1..20: mol_type = other RNA
ttggactagacacattttaa

SEQ ID NO: 5869 - RNA, 20 nt, synthetic construct
  misc_feature 1..20: note = source = /note="Description of Artificial Sequence: Synthetic oligonucleotide"
  source 1..20: mol_type = other RNA
tatatgtgactagtcactgt

SEQ ID NO: 5870 - RNA, 20 nt, synthetic construct
  misc_feature 1..20: note = source = /note="Description of Artificial Sequence: Synthetic oligonucleotide"
  source 1..20: mol_type = other RNA
ctagaccatctcttaatgta

SEQ ID NO: 5871 - RNA, 20 nt, synthetic construct
  misc_feature 1..20: note = source = /note="Description of Artificial Sequence: Synthetic oligonucleotide"
  source 1..20: mol_type = other RNA
accatctcttaatgtatgga

SEQ ID NO: 5872 - RNA, 20 nt, synthetic construct
  misc_feature 1..20: note = source = /note="Description of Artificial Sequence: Synthetic oligonucleotide"
  source 1..20: mol_type = other RNA
cagagtctcgctctgttgcc

SEQ ID NO: 5873 - RNA, 20 nt, synthetic construct
  misc_feature 1..20: note = source = /note="Description of Artificial Sequence: Synthetic oligonucleotide"
  source 1..20: mol_type = other RNA
gtctcgctctgttgccaggc

SEQ ID NO: 5874 - RNA, 20 nt, synthetic construct
  misc_feature 1..20: note = source = /note="Description of Artificial Sequence: Synthetic oligonucleotide"
  source 1..20: mol_type = other RNA
gttgccaggctggagtgcag

SEQ ID NO: 5875 - RNA, 20 nt, synthetic construct
  misc_feature 1..20: note = source = /note="Description of Artificial Sequence: Synthetic oligonucleotide"
  source 1..20: mol_type = other RNA
ggagtgcagtggcgcgatct

SEQ ID NO: 5876 - RNA, 20 nt, synthetic construct
  misc_feature 1..20: note = source = /note="Description of Artificial Sequence: Synthetic oligonucleotide"
  source 1..20: mol_type = other RNA
tcactgcaacctccgcctcc

SEQ ID NO: 5877 - RNA, 20 nt, synthetic construct
  misc_feature 1..20: note = source = /note="Description of Artificial Sequence: Synthetic oligonucleotide"
  source 1..20: mol_type = other RNA
cactgcaacctccgcctcct

SEQ ID NO: 5878 - RNA, 20 nt, synthetic construct
  misc_feature 1..20: note = source = /note="Description of Artificial Sequence: Synthetic oligonucleotide"
  source 1..20: mol_type = other RNA
gcctcagcctcccaagtaac

SEQ ID NO: 5879 - RNA, 20 nt, synthetic construct
  misc_feature 1..20: note = source = /note="Description of Artificial Sequence: Synthetic oligonucleotide"
  source 1..20: mol_type = other RNA
cctcagcctcccaagtaact

SEQ ID NO: 5880 - RNA, 20 nt, synthetic construct
  misc_feature 1..20: note = source = /note="Description of Artificial Sequence: Synthetic oligonucleotide"
  source 1..20: mol_type = other RNA
tcccaagtaactgggactac

SEQ ID NO: 5881 - RNA, 20 nt, synthetic construct
  misc_feature 1..20: note = source = /note="Description of Artificial Sequence: Synthetic oligonucleotide"
  source 1..20: mol_type = other RNA
actttttgtatttttagtag

SEQ ID NO: 5882 - RNA, 20 nt, synthetic construct
  misc_feature 1..20: note = source = /note="Description of Artificial Sequence: Synthetic oligonucleotide"
  source 1..20: mol_type = other RNA
ttttgtatttttagtagtgg

SEQ ID NO: 5883 - RNA, 20 nt, synthetic construct
  misc_feature 1..20: note = source = /note="Description of Artificial Sequence: Synthetic oligonucleotide"
  source 1..20: mol_type = other RNA
gtggcggtgtttgaccacgt

SEQ ID NO: 5884 - RNA, 20 nt, synthetic construct
  misc_feature 1..20: note = source = /note="Description of Artificial Sequence: Synthetic oligonucleotide"
  source 1..20: mol_type = other RNA
tttgaccacgttggccaaga

SEQ ID NO: 5885 - RNA, 20 nt, synthetic construct
  misc_feature 1..20: note = source = /note="Description of Artificial Sequence: Synthetic oligonucleotide"
  source 1..20: mol_type = other RNA
gcctcagcctcccaaagtgc

SEQ ID NO: 5886 - RNA, 20 nt, synthetic construct
  misc_feature 1..20: note = source = /note="Description of Artificial Sequence: Synthetic oligonucleotide"
  source 1..20: mol_type = other RNA
cctcagcctcccaaagtgct

SEQ ID NO: 5887 - RNA, 20 nt, synthetic construct
  misc_feature 1..20: note = source = /note="Description of Artificial Sequence: Synthetic oligonucleotide"
  source 1..20: mol_type = other RNA
tcccaaagtgctgggactac

SEQ ID NO: 5888 - RNA, 20 nt, synthetic construct
  misc_feature 1..20: note = source = /note="Description of Artificial Sequence: Synthetic oligonucleotide"
  source 1..20: mol_type = other RNA
caggcgtgagccaccgtgcc

SEQ ID NO: 5889 - RNA, 20 nt, synthetic construct
  misc_feature 1..20: note = source = /note="Description of Artificial Sequence: Synthetic oligonucleotide"
  source 1..20: mol_type = other RNA
tattaagtaatacacatgct

SEQ ID NO: 5890 - RNA, 20 nt, synthetic construct
  misc_feature 1..20: note = source = /note="Description of Artificial Sequence: Synthetic oligonucleotide"
  source 1..20: mol_type = other RNA
gttatttaaaaaaaaaaaaa

SEQ ID NO: 5891 - RNA, 20 nt, synthetic construct
  misc_feature 1..20: note = source = /note="Description of Artificial Sequence: Synthetic oligonucleotide"
  source 1..20: mol_type = other RNA
agctgccccattccttttcc

SEQ ID NO: 5892 - RNA, 20 nt, synthetic construct
  misc_feature 1..20: note = source = /note="Description of Artificial Sequence: Synthetic oligonucleotide"
  source 1..20: mol_type = other RNA
tgccccattccttttcctgg

SEQ ID NO: 5893 - RNA, 20 nt, synthetic construct
  misc_feature 1..20: note = source = /note="Description of Artificial Sequence: Synthetic oligonucleotide"
  source 1..20: mol_type = other RNA
ttcctggaggcaaattatta

SEQ ID NO: 5894 - RNA, 20 nt, synthetic construct
  misc_feature 1..20: note = source = /note="Description of Artificial Sequence: Synthetic oligonucleotide"
  source 1..20: mol_type = other RNA
gatttttttttattttacaa

SEQ ID NO: 5895 - RNA, 20 nt, synthetic construct
  misc_feature 1..20: note = source = /note="Description of Artificial Sequence: Synthetic oligonucleotide"
  source 1..20: mol_type = other RNA
tttttattttacaaaggtat

SEQ ID NO: 5896 - RNA, 20 nt, synthetic construct
  misc_feature 1..20: note = source = /note="Description of Artificial Sequence: Synthetic oligonucleotide"
  source 1..20: mol_type = other RNA
cctttattccatttaattac

SEQ ID NO: 5897 - RNA, 20 nt, synthetic construct
  misc_feature 1..20: note = source = /note="Description of Artificial Sequence: Synthetic oligonucleotide"
  source 1..20: mol_type = other RNA
ctttattccatttaattact

SEQ ID NO: 5898 - RNA, 20 nt, synthetic construct
  misc_feature 1..20: note = source = /note="Description of Artificial Sequence: Synthetic oligonucleotide"
  source 1..20: mol_type = other RNA
tactaattttaatagctaca

SEQ ID NO: 5899 - RNA, 20 nt, synthetic construct
  misc_feature 1..20: note = source = /note="Description of Artificial Sequence: Synthetic oligonucleotide"
  source 1..20: mol_type = other RNA
ctacatggtattatattgtg

SEQ ID NO: 5900 - RNA, 20 nt, synthetic construct
  misc_feature 1..20: note = source = /note="Description of Artificial Sequence: Synthetic oligonucleotide"
  source 1..20: mol_type = other RNA
aacataacccttattgatgt

SEQ ID NO: 5901 - RNA, 20 nt, synthetic construct
  misc_feature 1..20: note = source = /note="Description of Artificial Sequence: Synthetic oligonucleotide"
  source 1..20: mol_type = other RNA
agtgtctcactctgtcaccc

SEQ ID NO: 5902 - RNA, 20 nt, synthetic construct
  misc_feature 1..20: note = source = /note="Description of Artificial Sequence: Synthetic oligonucleotide"
  source 1..20: mol_type = other RNA
tctcactctgtcacccaggc

SEQ ID NO: 5903 - RNA, 20 nt, synthetic construct
  misc_feature 1..20: note = source = /note="Description of Artificial Sequence: Synthetic oligonucleotide"
  source 1..20: mol_type = other RNA
tcactgcagtgtccacctcc

SEQ ID NO: 5904 - RNA, 20 nt, synthetic construct
  misc_feature 1..20: note = source = /note="Description of Artificial Sequence: Synthetic oligonucleotide"
  source 1..20: mol_type = other RNA
cactgcagtgtccacctcct

SEQ ID NO: 5905 - RNA, 20 nt, synthetic construct
  misc_feature 1..20: note = source = /note="Description of Artificial Sequence: Synthetic oligonucleotide"
  source 1..20: mol_type = other RNA
agtgtccacctcctgggttc

SEQ ID NO: 5906 - RNA, 20 nt, synthetic construct
  misc_feature 1..20: note = source = /note="Description of Artificial Sequence: Synthetic oligonucleotide"
  source 1..20: mol_type = other RNA
tcctcagcctcccaagtaac

SEQ ID NO: 5907 - RNA, 20 nt, synthetic construct
  misc_feature 1..20: note = source = /note="Description of Artificial Sequence: Synthetic oligonucleotide"
  source 1..20: mol_type = other RNA
cctcagcctcccaagtaact

SEQ ID NO: 5908 - RNA, 20 nt, synthetic construct
  misc_feature 1..20: note = source = /note="Description of Artificial Sequence: Synthetic oligonucleotide"
  source 1..20: mol_type = other RNA
tcccaagtaactgggattac

SEQ ID NO: 5909 - RNA, 20 nt, synthetic construct
  misc_feature 1..20: note = source = /note="Description of Artificial Sequence: Synthetic oligonucleotide"
  source 1..20: mol_type = other RNA
gctaatttttgtatcttttt

SEQ ID NO: 5910 - RNA, 20 nt, synthetic construct
  misc_feature 1..20: note = source = /note="Description of Artificial Sequence: Synthetic oligonucleotide"
  source 1..20: mol_type = other RNA
ttgtatctttttaggagaga

SEQ ID NO: 5911 - RNA, 20 nt, synthetic construct
  misc_feature 1..20: note = source = /note="Description of Artificial Sequence: Synthetic oligonucleotide"
  source 1..20: mol_type = other RNA
tgtatctttttaggagagac

SEQ ID NO: 5912 - RNA, 20 nt, synthetic construct
  misc_feature 1..20: note = source = /note="Description of Artificial Sequence: Synthetic oligonucleotide"
  source 1..20: mol_type = other RNA
gagacgggatttcaccatgt

SEQ ID NO: 5913 - RNA, 20 nt, synthetic construct
  misc_feature 1..20: note = source = /note="Description of Artificial Sequence: Synthetic oligonucleotide"
  source 1..20: mol_type = other RNA
gggatttcaccatgttggcc

SEQ ID NO: 5914 - RNA, 20 nt, synthetic construct
  misc_feature 1..20: note = source = /note="Description of Artificial Sequence: Synthetic oligonucleotide"
  source 1..20: mol_type = other RNA
tttcaccatgttggccaggt

SEQ ID NO: 5915 - RNA, 20 nt, synthetic construct
  misc_feature 1..20: note = source = /note="Description of Artificial Sequence: Synthetic oligonucleotide"
  source 1..20: mol_type = other RNA
ccaggttggtctagaactcc

SEQ ID NO: 5916 - RNA, 20 nt, synthetic construct
  misc_feature 1..20: note = source = /note="Description of Artificial Sequence: Synthetic oligonucleotide"
  source 1..20: mol_type = other RNA
ggtctagaactcctggcctc

SEQ ID NO: 5917 - RNA, 20 nt, synthetic construct
  misc_feature 1..20: note = source = /note="Description of Artificial Sequence: Synthetic oligonucleotide"
  source 1..20: mol_type = other RNA
cctggcctcaggtgatccac

SEQ ID NO: 5918 - RNA, 20 nt, synthetic construct
  misc_feature 1..20: note = source = /note="Description of Artificial Sequence: Synthetic oligonucleotide"
  source 1..20: mol_type = other RNA
gccttagcttcccaaagtgc

SEQ ID NO: 5919 - RNA, 20 nt, synthetic construct
  misc_feature 1..20: note = source = /note="Description of Artificial Sequence: Synthetic oligonucleotide"
  source 1..20: mol_type = other RNA
ccttagcttcccaaagtgct

SEQ ID NO: 5920 - RNA, 20 nt, synthetic construct
  misc_feature 1..20: note = source = /note="Description of Artificial Sequence: Synthetic oligonucleotide"
  source 1..20: mol_type = other RNA
tcccaaagtgctgggattat

SEQ ID NO: 5921 - RNA, 20 nt, synthetic construct
  misc_feature 1..20: note = source = /note="Description of Artificial Sequence: Synthetic oligonucleotide"
  source 1..20: mol_type = other RNA
ctgtcagataaattcttaaa

SEQ ID NO: 5922 - RNA, 20 nt, synthetic construct
  misc_feature 1..20: note = source = /note="Description of Artificial Sequence: Synthetic oligonucleotide"
  source 1..20: mol_type = other RNA
tgtcagataaattcttaaaa

SEQ ID NO: 5923 - RNA, 20 nt, synthetic construct
  misc_feature 1..20: note = source = /note="Description of Artificial Sequence: Synthetic oligonucleotide"
  source 1..20: mol_type = other RNA
ataaattcttaaaagggtca

SEQ ID NO: 5924 - RNA, 20 nt, synthetic construct
  misc_feature 1..20: note = source = /note="Description of Artificial Sequence: Synthetic oligonucleotide"
  source 1..20: mol_type = other RNA
gtcatcctacatgatatttg

SEQ ID NO: 5925 - RNA, 20 nt, synthetic construct
  misc_feature 1..20: note = source = /note="Description of Artificial Sequence: Synthetic oligonucleotide"
  source 1..20: mol_type = other RNA
gcttactgatcttcactaat

SEQ ID NO: 5926 - RNA, 20 nt, synthetic construct
  misc_feature 1..20: note = source = /note="Description of Artificial Sequence: Synthetic oligonucleotide"
  source 1..20: mol_type = other RNA
cttgtccattttttagtatg

SEQ ID NO: 5927 - RNA, 20 nt, synthetic construct
  misc_feature 1..20: note = source = /note="Description of Artificial Sequence: Synthetic oligonucleotide"
  source 1..20: mol_type = other RNA
gtggttattcatttatttgt

SEQ ID NO: 5928 - RNA, 20 nt, synthetic construct
  misc_feature 1..20: note = source = /note="Description of Artificial Sequence: Synthetic oligonucleotide"
  source 1..20: mol_type = other RNA
ctctttttacatgtttattt

SEQ ID NO: 5929 - RNA, 20 nt, synthetic construct
  misc_feature 1..20: note = source = /note="Description of Artificial Sequence: Synthetic oligonucleotide"
  source 1..20: mol_type = other RNA
ctcagattgtttttaacttt

SEQ ID NO: 5930 - RNA, 20 nt, synthetic construct
  misc_feature 1..20: note = source = /note="Description of Artificial Sequence: Synthetic oligonucleotide"
  source 1..20: mol_type = other RNA
tcagattgtttttaactttt

SEQ ID NO: 5931 - RNA, 20 nt, synthetic construct
  misc_feature 1..20: note = source = /note="Description of Artificial Sequence: Synthetic oligonucleotide"
  source 1..20: mol_type = other RNA
cagattgtttttaacttttg

SEQ ID NO: 5932 - RNA, 20 nt, synthetic construct
  misc_feature 1..20: note = source = /note="Description of Artificial Sequence: Synthetic oligonucleotide"
  source 1..20: mol_type = other RNA
agattgtttttaacttttgg

SEQ ID NO: 5933 - RNA, 20 nt, synthetic construct
  misc_feature 1..20: note = source = /note="Description of Artificial Sequence: Synthetic oligonucleotide"
  source 1..20: mol_type = other RNA
gattgtttttaacttttggg

SEQ ID NO: 5934 - RNA, 20 nt, synthetic construct
  misc_feature 1..20: note = source = /note="Description of Artificial Sequence: Synthetic oligonucleotide"
  source 1..20: mol_type = other RNA
attgtttttaacttttgggg

SEQ ID NO: 5935 - RNA, 20 nt, synthetic construct
  misc_feature 1..20: note = source = /note="Description of Artificial Sequence: Synthetic oligonucleotide"
  source 1..20: mol_type = other RNA
agaatttatcttaaagtgta

SEQ ID NO: 5936 - RNA, 20 nt, synthetic construct
  misc_feature 1..20: note = source = /note="Description of Artificial Sequence: Synthetic oligonucleotide"
  source 1..20: mol_type = other RNA
gaatttatcttaaagtgtaa

SEQ ID NO: 5937 - RNA, 20 nt, synthetic construct
  misc_feature 1..20: note = source = /note="Description of Artificial Sequence: Synthetic oligonucleotide"
  source 1..20: mol_type = other RNA
tcccactttatcattttttc

SEQ ID NO: 5938 - RNA, 20 nt, synthetic construct
  misc_feature 1..20: note = source = /note="Description of Artificial Sequence: Synthetic oligonucleotide"
  source 1..20: mol_type = other RNA
tatcttgtagcatatttctg

SEQ ID NO: 5939 - RNA, 20 nt, synthetic construct
  misc_feature 1..20: note = source = /note="Description of Artificial Sequence: Synthetic oligonucleotide"
  source 1..20: mol_type = other RNA
tgtagcatatttctgtggtt

SEQ ID NO: 5940 - RNA, 20 nt, synthetic construct
  misc_feature 1..20: note = source = /note="Description of Artificial Sequence: Synthetic oligonucleotide"
  source 1..20: mol_type = other RNA
gtagcatatttctgtggttt

SEQ ID NO: 5941 - RNA, 20 nt, synthetic construct
  misc_feature 1..20: note = source = /note="Description of Artificial Sequence: Synthetic oligonucleotide"
  source 1..20: mol_type = other RNA
cttttaaatatcttttaatt

SEQ ID NO: 5942 - RNA, 20 nt, synthetic construct
  misc_feature 1..20: note = source = /note="Description of Artificial Sequence: Synthetic oligonucleotide"
  source 1..20: mol_type = other RNA
tatcttttaatttggctact

SEQ ID NO: 5943 - RNA, 20 nt, synthetic construct
  misc_feature 1..20: note = source = /note="Description of Artificial Sequence: Synthetic oligonucleotide"
  source 1..20: mol_type = other RNA
attctttttcagaatattcc

SEQ ID NO: 5944 - RNA, 20 nt, synthetic construct
  misc_feature 1..20: note = source = /note="Description of Artificial Sequence: Synthetic oligonucleotide"
  source 1..20: mol_type = other RNA
ttatttttccaaatgaactt

SEQ ID NO: 5945 - RNA, 20 nt, synthetic construct
  misc_feature 1..20: note = source = /note="Description of Artificial Sequence: Synthetic oligonucleotide"
  source 1..20: mol_type = other RNA
ttttaaagttatattaaaat

SEQ ID NO: 5946 - RNA, 20 nt, synthetic construct
  misc_feature 1..20: note = source = /note="Description of Artificial Sequence: Synthetic oligonucleotide"
  source 1..20: mol_type = other RNA
attccagtaaaacttctgac

SEQ ID NO: 5947 - RNA, 20 nt, synthetic construct
  misc_feature 1..20: note = source = /note="Description of Artificial Sequence: Synthetic oligonucleotide"
  source 1..20: mol_type = other RNA
gttgatgctcttataaatca

SEQ ID NO: 5948 - RNA, 20 nt, synthetic construct
  misc_feature 1..20: note = source = /note="Description of Artificial Sequence: Synthetic oligonucleotide"
  source 1..20: mol_type = other RNA
cattttttacttgattctct

SEQ ID NO: 5949 - RNA, 20 nt, synthetic construct
  misc_feature 1..20: note = source = /note="Description of Artificial Sequence: Synthetic oligonucleotide"
  source 1..20: mol_type = other RNA
aaatgtaatgagaaagactg

SEQ ID NO: 5950 - RNA, 20 nt, synthetic construct
  misc_feature 1..20: note = source = /note="Description of Artificial Sequence: Synthetic oligonucleotide"
  source 1..20: mol_type = other RNA
aatgtaatgagaaagactgt

SEQ ID NO: 5951 - RNA, 20 nt, synthetic construct
  misc_feature 1..20: note = source = /note="Description of Artificial Sequence: Synthetic oligonucleotide"
  source 1..20: mol_type = other RNA
aaagcagacaccttatacaa

SEQ ID NO: 5952 - RNA, 20 nt, synthetic construct
  misc_feature 1..20: note = source = /note="Description of Artificial Sequence: Synthetic oligonucleotide"
  source 1..20: mol_type = other RNA
ttttttagtgccatttcttc

SEQ ID NO: 5953 - RNA, 20 nt, synthetic construct
  misc_feature 1..20: note = source = /note="Description of Artificial Sequence: Synthetic oligonucleotide"
  source 1..20: mol_type = other RNA
cttctggctttctctattat

SEQ ID NO: 5954 - RNA, 20 nt, synthetic construct
  misc_feature 1..20: note = source = /note="Description of Artificial Sequence: Synthetic oligonucleotide"
  source 1..20: mol_type = other RNA
ttctggctttctctattatt

SEQ ID NO: 5955 - RNA, 20 nt, synthetic construct
  misc_feature 1..20: note = source = /note="Description of Artificial Sequence: Synthetic oligonucleotide"
  source 1..20: mol_type = other RNA
aatgaatgcaatcagattca

SEQ ID NO: 5956 - RNA, 20 nt, synthetic construct
  misc_feature 1..20: note = source = /note="Description of Artificial Sequence: Synthetic oligonucleotide"
  source 1..20: mol_type = other RNA
atgaatgcaatcagattcaa

SEQ ID NO: 5957 - RNA, 20 nt, synthetic construct
  misc_feature 1..20: note = source = /note="Description of Artificial Sequence: Synthetic oligonucleotide"
  source 1..20: mol_type = other RNA
agattcaagggtacaagtgc

SEQ ID NO: 5958 - RNA, 20 nt, synthetic construct
  misc_feature 1..20: note = source = /note="Description of Artificial Sequence: Synthetic oligonucleotide"
  source 1..20: mol_type = other RNA
ggtacaagtgcaggttatat

SEQ ID NO: 5959 - RNA, 20 nt, synthetic construct
  misc_feature 1..20: note = source = /note="Description of Artificial Sequence: Synthetic oligonucleotide"
  source 1..20: mol_type = other RNA
tataggtgaattgcatgcct

SEQ ID NO: 5960 - RNA, 20 nt, synthetic construct
  misc_feature 1..20: note = source = /note="Description of Artificial Sequence: Synthetic oligonucleotide"
  source 1..20: mol_type = other RNA
ataggtgaattgcatgcctt

SEQ ID NO: 5961 - RNA, 20 nt, synthetic construct
  misc_feature 1..20: note = source = /note="Description of Artificial Sequence: Synthetic oligonucleotide"
  source 1..20: mol_type = other RNA
taggtgaattgcatgccttg

SEQ ID NO: 5962 - RNA, 20 nt, synthetic construct
  misc_feature 1..20: note = source = /note="Description of Artificial Sequence: Synthetic oligonucleotide"
  source 1..20: mol_type = other RNA
aggtgaattgcatgccttgg

SEQ ID NO: 5963 - RNA, 20 nt, synthetic construct
  misc_feature 1..20: note = source = /note="Description of Artificial Sequence: Synthetic oligonucleotide"
  source 1..20: mol_type = other RNA
aattgcatgccttgggggtt

SEQ ID NO: 5964 - RNA, 20 nt, synthetic construct
  misc_feature 1..20: note = source = /note="Description of Artificial Sequence: Synthetic oligonucleotide"
  source 1..20: mol_type = other RNA
tacagactattttgtcaccc

SEQ ID NO: 5965 - RNA, 20 nt, synthetic construct
  misc_feature 1..20: note = source = /note="Description of Artificial Sequence: Synthetic oligonucleotide"
  source 1..20: mol_type = other RNA
taataagcgtagtacttaat

SEQ ID NO: 5966 - RNA, 20 nt, synthetic construct
  misc_feature 1..20: note = source = /note="Description of Artificial Sequence: Synthetic oligonucleotide"
  source 1..20: mol_type = other RNA
ctgccacttaagagaacatg

SEQ ID NO: 5967 - RNA, 20 nt, synthetic construct
  misc_feature 1..20: note = source = /note="Description of Artificial Sequence: Synthetic oligonucleotide"
  source 1..20: mol_type = other RNA
gttcctttgttagtttgttt

SEQ ID NO: 5968 - RNA, 20 nt, synthetic construct
  misc_feature 1..20: note = source = /note="Description of Artificial Sequence: Synthetic oligonucleotide"
  source 1..20: mol_type = other RNA
tgttagtttgtttaggataa

SEQ ID NO: 5969 - RNA, 20 nt, synthetic construct
  misc_feature 1..20: note = source = /note="Description of Artificial Sequence: Synthetic oligonucleotide"
  source 1..20: mol_type = other RNA
cacgattttgtgtttcttta

SEQ ID NO: 5970 - RNA, 20 nt, synthetic construct
  misc_feature 1..20: note = source = /note="Description of Artificial Sequence: Synthetic oligonucleotide"
  source 1..20: mol_type = other RNA
tatggctgtgtagtattcca

SEQ ID NO: 5971 - RNA, 20 nt, synthetic construct
  misc_feature 1..20: note = source = /note="Description of Artificial Sequence: Synthetic oligonucleotide"
  source 1..20: mol_type = other RNA
tttatccagtctactactta

SEQ ID NO: 5972 - RNA, 20 nt, synthetic construct
  misc_feature 1..20: note = source = /note="Description of Artificial Sequence: Synthetic oligonucleotide"
  source 1..20: mol_type = other RNA
tctactacttacggacattt

SEQ ID NO: 5973 - RNA, 20 nt, synthetic construct
  misc_feature 1..20: note = source = /note="Description of Artificial Sequence: Synthetic oligonucleotide"
  source 1..20: mol_type = other RNA
acgtgtgcaatatgccttta

SEQ ID NO: 5974 - RNA, 20 nt, synthetic construct
  misc_feature 1..20: note = source = /note="Description of Artificial Sequence: Synthetic oligonucleotide"
  source 1..20: mol_type = other RNA
tagaatgatttatatccctt

SEQ ID NO: 5975 - RNA, 20 nt, synthetic construct
  misc_feature 1..20: note = source = /note="Description of Artificial Sequence: Synthetic oligonucleotide"
  source 1..20: mol_type = other RNA
agaatgatttatatcccttt

SEQ ID NO: 5976 - RNA, 20 nt, synthetic construct
  misc_feature 1..20: note = source = /note="Description of Artificial Sequence: Synthetic oligonucleotide"
  source 1..20: mol_type = other RNA
ttgggtaatatgccgaataa

SEQ ID NO: 5977 - RNA, 20 nt, synthetic construct
  misc_feature 1..20: note = source = /note="Description of Artificial Sequence: Synthetic oligonucleotide"
  source 1..20: mol_type = other RNA
tgggtaatatgccgaataat

SEQ ID NO: 5978 - RNA, 20 nt, synthetic construct
  misc_feature 1..20: note = source = /note="Description of Artificial Sequence: Synthetic oligonucleotide"
  source 1..20: mol_type = other RNA
tgccgaataatgggattgct

SEQ ID NO: 5979 - RNA, 20 nt, synthetic construct
  misc_feature 1..20: note = source = /note="Description of Artificial Sequence: Synthetic oligonucleotide"
  source 1..20: mol_type = other RNA
aatgggattgctcggtcaga

SEQ ID NO: 5980 - RNA, 20 nt, synthetic construct
  misc_feature 1..20: note = source = /note="Description of Artificial Sequence: Synthetic oligonucleotide"
  source 1..20: mol_type = other RNA
ttacattcccacaagcaata

SEQ ID NO: 5981 - RNA, 20 nt, synthetic construct
  misc_feature 1..20: note = source = /note="Description of Artificial Sequence: Synthetic oligonucleotide"
  source 1..20: mol_type = other RNA
tacattcccacaagcaataa

SEQ ID NO: 5982 - RNA, 20 nt, synthetic construct
  misc_feature 1..20: note = source = /note="Description of Artificial Sequence: Synthetic oligonucleotide"
  source 1..20: mol_type = other RNA
acattcccacaagcaataag

SEQ ID NO: 5983 - RNA, 20 nt, synthetic construct
  misc_feature 1..20: note = source = /note="Description of Artificial Sequence: Synthetic oligonucleotide"
  source 1..20: mol_type = other RNA
aagtgttcccttttctctgc

SEQ ID NO: 5984 - RNA, 20 nt, synthetic construct
  misc_feature 1..20: note = source = /note="Description of Artificial Sequence: Synthetic oligonucleotide"
  source 1..20: mol_type = other RNA
ttcttttagagagtcaaaga

SEQ ID NO: 5985 - RNA, 20 nt, synthetic construct
  misc_feature 1..20: note = source = /note="Description of Artificial Sequence: Synthetic oligonucleotide"
  source 1..20: mol_type = other RNA
agagtcaaagatggaatcct

SEQ ID NO: 5986 - RNA, 20 nt, synthetic construct
  misc_feature 1..20: note = source = /note="Description of Artificial Sequence: Synthetic oligonucleotide"
  source 1..20: mol_type = other RNA
gagtcaaagatggaatccta

SEQ ID NO: 5987 - RNA, 20 nt, synthetic construct
  misc_feature 1..20: note = source = /note="Description of Artificial Sequence: Synthetic oligonucleotide"
  source 1..20: mol_type = other RNA
cctagggaagatgatatctg

SEQ ID NO: 5988 - RNA, 20 nt, synthetic construct
  misc_feature 1..20: note = source = /note="Description of Artificial Sequence: Synthetic oligonucleotide"
  source 1..20: mol_type = other RNA
gggaagatgatatctgaggc

SEQ ID NO: 5989 - RNA, 20 nt, synthetic construct
  misc_feature 1..20: note = source = /note="Description of Artificial Sequence: Synthetic oligonucleotide"
  source 1..20: mol_type = other RNA
tgaggcaggtttagagtcat

SEQ ID NO: 5990 - RNA, 20 nt, synthetic construct
  misc_feature 1..20: note = source = /note="Description of Artificial Sequence: Synthetic oligonucleotide"
  source 1..20: mol_type = other RNA
gaggcaggtttagagtcatt

SEQ ID NO: 5991 - RNA, 20 nt, synthetic construct
  misc_feature 1..20: note = source = /note="Description of Artificial Sequence: Synthetic oligonucleotide"
  source 1..20: mol_type = other RNA
ttagagtcattgggcaaata

SEQ ID NO: 5992 - RNA, 20 nt, synthetic construct
  misc_feature 1..20: note = source = /note="Description of Artificial Sequence: Synthetic oligonucleotide"
  source 1..20: mol_type = other RNA
tagagtcattgggcaaataa

SEQ ID NO: 5993 - RNA, 20 nt, synthetic construct
  misc_feature 1..20: note = source = /note="Description of Artificial Sequence: Synthetic oligonucleotide"
  source 1..20: mol_type = other RNA
agagtcattgggcaaataag

SEQ ID NO: 5994 - RNA, 20 nt, synthetic construct
  misc_feature 1..20: note = source = /note="Description of Artificial Sequence: Synthetic oligonucleotide"
  source 1..20: mol_type = other RNA
ggcaaataaggggattaaga

SEQ ID NO: 5995 - RNA, 20 nt, synthetic construct
  misc_feature 1..20: note = source = /note="Description of Artificial Sequence: Synthetic oligonucleotide"
  source 1..20: mol_type = other RNA
ggggattaagaaggcattct

SEQ ID NO: 5996 - RNA, 20 nt, synthetic construct
  misc_feature 1..20: note = source = /note="Description of Artificial Sequence: Synthetic oligonucleotide"
  source 1..20: mol_type = other RNA
ctaggcagacagaaaaccaa

SEQ ID NO: 5997 - RNA, 20 nt, synthetic construct
  misc_feature 1..20: note = source = /note="Description of Artificial Sequence: Synthetic oligonucleotide"
  source 1..20: mol_type = other RNA
ctgaaacagcttactatgtt

SEQ ID NO: 5998 - RNA, 20 nt, synthetic construct
  misc_feature 1..20: note = source = /note="Description of Artificial Sequence: Synthetic oligonucleotide"
  source 1..20: mol_type = other RNA
ttataagctgttgttattgt

SEQ ID NO: 5999 - RNA, 20 nt, synthetic construct
  misc_feature 1..20: note = source = /note="Description of Artificial Sequence: Synthetic oligonucleotide"
  source 1..20: mol_type = other RNA
tataaactgtaagagagagt

SEQ ID NO: 6000 - RNA, 20 nt, synthetic construct
  misc_feature 1..20: note = source = /note="Description of Artificial Sequence: Synthetic oligonucleotide"
  source 1..20: mol_type = other RNA
aaactgtaagagagagtagg

SEQ ID NO: 6001 - RNA, 20 nt, synthetic construct
  misc_feature 1..20: note = source = /note="Description of Artificial Sequence: Synthetic oligonucleotide"
  source 1..20: mol_type = other RNA
cagaaaaaacagcctgtatg

SEQ ID NO: 6002 - RNA, 20 nt, synthetic construct
  misc_feature 1..20: note = source = /note="Description of Artificial Sequence: Synthetic oligonucleotide"
  source 1..20: mol_type = other RNA
agaaaaaacagcctgtatgc

SEQ ID NO: 6003 - RNA, 20 nt, synthetic construct
  misc_feature 1..20: note = source = /note="Description of Artificial Sequence: Synthetic oligonucleotide"
  source 1..20: mol_type = other RNA
gaaaaaacagcctgtatgcg

SEQ ID NO: 6004 - RNA, 20 nt, synthetic construct
  misc_feature 1..20: note = source = /note="Description of Artificial Sequence: Synthetic oligonucleotide"
  source 1..20: mol_type = other RNA
aaaaaacagcctgtatgcgg

SEQ ID NO: 6005 - RNA, 20 nt, synthetic construct
  misc_feature 1..20: note = source = /note="Description of Artificial Sequence: Synthetic oligonucleotide"
  source 1..20: mol_type = other RNA
aaaaacagcctgtatgcggg

SEQ ID NO: 6006 - RNA, 20 nt, synthetic construct
  misc_feature 1..20: note = source = /note="Description of Artificial Sequence: Synthetic oligonucleotide"
  source 1..20: mol_type = other RNA
acagaaattctcaaaagatt

SEQ ID NO: 6007 - RNA, 20 nt, synthetic construct
  misc_feature 1..20: note = source = /note="Description of Artificial Sequence: Synthetic oligonucleotide"
  source 1..20: mol_type = other RNA
cagaaattctcaaaagattt

SEQ ID NO: 6008 - RNA, 20 nt, synthetic construct
  misc_feature 1..20: note = source = /note="Description of Artificial Sequence: Synthetic oligonucleotide"
  source 1..20: mol_type = other RNA
aaacatagaatcacctagaa

SEQ ID NO: 6009 - RNA, 20 nt, synthetic construct
  misc_feature 1..20: note = source = /note="Description of Artificial Sequence: Synthetic oligonucleotide"
  source 1..20: mol_type = other RNA
aacatagaatcacctagaaa

SEQ ID NO: 6010 - RNA, 20 nt, synthetic construct
  misc_feature 1..20: note = source = /note="Description of Artificial Sequence: Synthetic oligonucleotide"
  source 1..20: mol_type = other RNA
atcacccctattctgtcacc

SEQ ID NO: 6011 - RNA, 20 nt, synthetic construct
  misc_feature 1..20: note = source = /note="Description of Artificial Sequence: Synthetic oligonucleotide"
  source 1..20: mol_type = other RNA
tggaatattgataacactga

SEQ ID NO: 6012 - RNA, 20 nt, synthetic construct
  misc_feature 1..20: note = source = /note="Description of Artificial Sequence: Synthetic oligonucleotide"
  source 1..20: mol_type = other RNA
ggaatattgataacactgaa

SEQ ID NO: 6013 - RNA, 20 nt, synthetic construct
  misc_feature 1..20: note = source = /note="Description of Artificial Sequence: Synthetic oligonucleotide"
  source 1..20: mol_type = other RNA
gggagtgtgccttatctctc

SEQ ID NO: 6014 - RNA, 20 nt, synthetic construct
  misc_feature 1..20: note = source = /note="Description of Artificial Sequence: Synthetic oligonucleotide"
  source 1..20: mol_type = other RNA
ccttatctctcaggtgtatt

SEQ ID NO: 6015 - RNA, 20 nt, synthetic construct
  misc_feature 1..20: note = source = /note="Description of Artificial Sequence: Synthetic oligonucleotide"
  source 1..20: mol_type = other RNA
aaatagtttgagaaccatgc

SEQ ID NO: 6016 - RNA, 20 nt, synthetic construct
  misc_feature 1..20: note = source = /note="Description of Artificial Sequence: Synthetic oligonucleotide"
  source 1..20: mol_type = other RNA
aatcttccttttgataacaa

SEQ ID NO: 6017 - RNA, 20 nt, synthetic construct
  misc_feature 1..20: note = source = /note="Description of Artificial Sequence: Synthetic oligonucleotide"
  source 1..20: mol_type = other RNA
atcttccttttgataacaaa

SEQ ID NO: 6018 - RNA, 20 nt, synthetic construct
  misc_feature 1..20: note = source = /note="Description of Artificial Sequence: Synthetic oligonucleotide"
  source 1..20: mol_type = other RNA
gataacaaagggaaccttaa

SEQ ID NO: 6019 - RNA, 20 nt, synthetic construct
  misc_feature 1..20: note = source = /note="Description of Artificial Sequence: Synthetic oligonucleotide"
  source 1..20: mol_type = other RNA
ataacaaagggaaccttaaa

SEQ ID NO: 6020 - RNA, 20 nt, synthetic construct
  misc_feature 1..20: note = source = /note="Description of Artificial Sequence: Synthetic oligonucleotide"
  source 1..20: mol_type = other RNA
caaagggaaccttaaagggc

SEQ ID NO: 6021 - RNA, 20 nt, synthetic construct
  misc_feature 1..20: note = source = /note="Description of Artificial Sequence: Synthetic oligonucleotide"
  source 1..20: mol_type = other RNA
agggaaccttaaagggctgg

SEQ ID NO: 6022 - RNA, 20 nt, synthetic construct
  misc_feature 1..20: note = source = /note="Description of Artificial Sequence: Synthetic oligonucleotide"
  source 1..20: mol_type = other RNA
gggaaccttaaagggctgga

SEQ ID NO: 6023 - RNA, 20 nt, synthetic construct
  misc_feature 1..20: note = source = /note="Description of Artificial Sequence: Synthetic oligonucleotide"
  source 1..20: mol_type = other RNA
ggaaccttaaagggctggag

SEQ ID NO: 6024 - RNA, 20 nt, synthetic construct
  misc_feature 1..20: note = source = /note="Description of Artificial Sequence: Synthetic oligonucleotide"
  source 1..20: mol_type = other RNA
ccttaaagggctggagggga

SEQ ID NO: 6025 - RNA, 20 nt, synthetic construct
  misc_feature 1..20: note = source = /note="Description of Artificial Sequence: Synthetic oligonucleotide"
  source 1..20: mol_type = other RNA
cttaaagggctggaggggaa

SEQ ID NO: 6026 - RNA, 20 nt, synthetic construct
  misc_feature 1..20: note = source = /note="Description of Artificial Sequence: Synthetic oligonucleotide"
  source 1..20: mol_type = other RNA
ggctggaggggaagggcaga

SEQ ID NO: 6027 - RNA, 20 nt, synthetic construct
  misc_feature 1..20: note = source = /note="Description of Artificial Sequence: Synthetic oligonucleotide"
  source 1..20: mol_type = other RNA
gctggaggggaagggcagac

SEQ ID NO: 6028 - RNA, 20 nt, synthetic construct
  misc_feature 1..20: note = source = /note="Description of Artificial Sequence: Synthetic oligonucleotide"
  source 1..20: mol_type = other RNA
ctggaggggaagggcagacg

SEQ ID NO: 6029 - RNA, 20 nt, synthetic construct
  misc_feature 1..20: note = source = /note="Description of Artificial Sequence: Synthetic oligonucleotide"
  source 1..20: mol_type = other RNA
ggggaagggcagacggggct

SEQ ID NO: 6030 - RNA, 20 nt, synthetic construct
  misc_feature 1..20: note = source = /note="Description of Artificial Sequence: Synthetic oligonucleotide"
  source 1..20: mol_type = other RNA
gggaagggcagacggggcta

SEQ ID NO: 6031 - RNA, 20 nt, synthetic construct
  misc_feature 1..20: note = source = /note="Description of Artificial Sequence: Synthetic oligonucleotide"
  source 1..20: mol_type = other RNA
ggaagggcagacggggctag

SEQ ID NO: 6032 - RNA, 20 nt, synthetic construct
  misc_feature 1..20: note = source = /note="Description of Artificial Sequence: Synthetic oligonucleotide"
  source 1..20: mol_type = other RNA
agggcagacggggctagggg

SEQ ID NO: 6033 - RNA, 20 nt, synthetic construct
  misc_feature 1..20: note = source = /note="Description of Artificial Sequence: Synthetic oligonucleotide"
  source 1..20: mol_type = other RNA
cccttttaaaaagctactgc

SEQ ID NO: 6034 - RNA, 20 nt, synthetic construct
  misc_feature 1..20: note = source = /note="Description of Artificial Sequence: Synthetic oligonucleotide"
  source 1..20: mol_type = other RNA
ttttaaaaagctactgcagg

SEQ ID NO: 6035 - RNA, 20 nt, synthetic construct
  misc_feature 1..20: note = source = /note="Description of Artificial Sequence: Synthetic oligonucleotide"
  source 1..20: mol_type = other RNA
tttaaaaagctactgcaggt

SEQ ID NO: 6036 - RNA, 20 nt, synthetic construct
  misc_feature 1..20: note = source = /note="Description of Artificial Sequence: Synthetic oligonucleotide"
  source 1..20: mol_type = other RNA
ttaaaaagctactgcaggtg

SEQ ID NO: 6037 - RNA, 20 nt, synthetic construct
  misc_feature 1..20: note = source = /note="Description of Artificial Sequence: Synthetic oligonucleotide"
  source 1..20: mol_type = other RNA
aagctactgcaggtggggtg

SEQ ID NO: 6038 - RNA, 20 nt, synthetic construct
  misc_feature 1..20: note = source = /note="Description of Artificial Sequence: Synthetic oligonucleotide"
  source 1..20: mol_type = other RNA
ctactgcaggtggggtgcgg

SEQ ID NO: 6039 - RNA, 20 nt, synthetic construct
  misc_feature 1..20: note = source = /note="Description of Artificial Sequence: Synthetic oligonucleotide"
  source 1..20: mol_type = other RNA
cacctgtaatcccagcactt

SEQ ID NO: 6040 - RNA, 20 nt, synthetic construct
  misc_feature 1..20: note = source = /note="Description of Artificial Sequence: Synthetic oligonucleotide"
  source 1..20: mol_type = other RNA
acctgtaatcccagcacttt

SEQ ID NO: 6041 - RNA, 20 nt, synthetic construct
  misc_feature 1..20: note = source = /note="Description of Artificial Sequence: Synthetic oligonucleotide"
  source 1..20: mol_type = other RNA
tgtaatcccagcactttggg

SEQ ID NO: 6042 - RNA, 20 nt, synthetic construct
  misc_feature 1..20: note = source = /note="Description of Artificial Sequence: Synthetic oligonucleotide"
  source 1..20: mol_type = other RNA
cccagcactttgggaggcca

SEQ ID NO: 6043 - RNA, 20 nt, synthetic construct
  misc_feature 1..20: note = source = /note="Description of Artificial Sequence: Synthetic oligonucleotide"
  source 1..20: mol_type = other RNA
gcactttgggaggccaaggc

SEQ ID NO: 6044 - RNA, 20 nt, synthetic construct
  misc_feature 1..20: note = source = /note="Description of Artificial Sequence: Synthetic oligonucleotide"
  source 1..20: mol_type = other RNA
caaggcaggcagatcacctg

SEQ ID NO: 6045 - RNA, 20 nt, synthetic construct
  misc_feature 1..20: note = source = /note="Description of Artificial Sequence: Synthetic oligonucleotide"
  source 1..20: mol_type = other RNA
caggcagatcacctgaggtc

SEQ ID NO: 6046 - RNA, 20 nt, synthetic construct
  misc_feature 1..20: note = source = /note="Description of Artificial Sequence: Synthetic oligonucleotide"
  source 1..20: mol_type = other RNA
tcaggagttcaagaccagcc

SEQ ID NO: 6047 - RNA, 20 nt, synthetic construct
  misc_feature 1..20: note = source = /note="Description of Artificial Sequence: Synthetic oligonucleotide"
  source 1..20: mol_type = other RNA
taaaaatacaaaaattagct

SEQ ID NO: 6048 - RNA, 20 nt, synthetic construct
  misc_feature 1..20: note = source = /note="Description of Artificial Sequence: Synthetic oligonucleotide"
  source 1..20: mol_type = other RNA
atacaaaaattagctaggca

SEQ ID NO: 6049 - RNA, 20 nt, synthetic construct
  misc_feature 1..20: note = source = /note="Description of Artificial Sequence: Synthetic oligonucleotide"
  source 1..20: mol_type = other RNA
aattagctaggcatggtagc

SEQ ID NO: 6050 - RNA, 20 nt, synthetic construct
  misc_feature 1..20: note = source = /note="Description of Artificial Sequence: Synthetic oligonucleotide"
  source 1..20: mol_type = other RNA
cacctgtaatctcagctact

SEQ ID NO: 6051 - RNA, 20 nt, synthetic construct
  misc_feature 1..20: note = source = /note="Description of Artificial Sequence: Synthetic oligonucleotide"
  source 1..20: mol_type = other RNA
acctgtaatctcagctactt

SEQ ID NO: 6052 - RNA, 20 nt, synthetic construct
  misc_feature 1..20: note = source = /note="Description of Artificial Sequence: Synthetic oligonucleotide"
  source 1..20: mol_type = other RNA
tgtaatctcagctacttggg

SEQ ID NO: 6053 - RNA, 20 nt, synthetic construct
  misc_feature 1..20: note = source = /note="Description of Artificial Sequence: Synthetic oligonucleotide"
  source 1..20: mol_type = other RNA
ctcagctacttgggaggctg

SEQ ID NO: 6054 - RNA, 20 nt, synthetic construct
  misc_feature 1..20: note = source = /note="Description of Artificial Sequence: Synthetic oligonucleotide"
  source 1..20: mol_type = other RNA
gctacttgggaggctgaggc

SEQ ID NO: 6055 - RNA, 20 nt, synthetic construct
  misc_feature 1..20: note = source = /note="Description of Artificial Sequence: Synthetic oligonucleotide"
  source 1..20: mol_type = other RNA
gcaggagaattgcttgaacc

SEQ ID NO: 6056 - RNA, 20 nt, synthetic construct
  misc_feature 1..20: note = source = /note="Description of Artificial Sequence: Synthetic oligonucleotide"
  source 1..20: mol_type = other RNA
caggagaattgcttgaacct

SEQ ID NO: 6057 - RNA, 20 nt, synthetic construct
  misc_feature 1..20: note = source = /note="Description of Artificial Sequence: Synthetic oligonucleotide"
  source 1..20: mol_type = other RNA
gagaattgcttgaacctggg

SEQ ID NO: 6058 - RNA, 20 nt, synthetic construct
  misc_feature 1..20: note = source = /note="Description of Artificial Sequence: Synthetic oligonucleotide"
  source 1..20: mol_type = other RNA
tgcttgaacctgggaggcag

SEQ ID NO: 6059 - RNA, 20 nt, synthetic construct
  misc_feature 1..20: note = source = /note="Description of Artificial Sequence: Synthetic oligonucleotide"
  source 1..20: mol_type = other RNA
tgtgccgctgcactccagcc

SEQ ID NO: 6060 - RNA, 20 nt, synthetic construct
  misc_feature 1..20: note = source = /note="Description of Artificial Sequence: Synthetic oligonucleotide"
  source 1..20: mol_type = other RNA
gtgccgctgcactccagcct

SEQ ID NO: 6061 - RNA, 20 nt, synthetic construct
  misc_feature 1..20: note = source = /note="Description of Artificial Sequence: Synthetic oligonucleotide"
  source 1..20: mol_type = other RNA
aaaagctactgcagtagatc

SEQ ID NO: 6062 - RNA, 20 nt, synthetic construct
  misc_feature 1..20: note = source = /note="Description of Artificial Sequence: Synthetic oligonucleotide"
  source 1..20: mol_type = other RNA
agctactgcagtagatcagg

SEQ ID NO: 6063 - RNA, 20 nt, synthetic construct
  misc_feature 1..20: note = source = /note="Description of Artificial Sequence: Synthetic oligonucleotide"
  source 1..20: mol_type = other RNA
tactgcagtagatcaggagg

SEQ ID NO: 6064 - RNA, 20 nt, synthetic construct
  misc_feature 1..20: note = source = /note="Description of Artificial Sequence: Synthetic oligonucleotide"
  source 1..20: mol_type = other RNA
agaagatctgagctatgaag

SEQ ID NO: 6065 - RNA, 20 nt, synthetic construct
  misc_feature 1..20: note = source = /note="Description of Artificial Sequence: Synthetic oligonucleotide"
  source 1..20: mol_type = other RNA
gtggcagtcaagatgattaa

SEQ ID NO: 6066 - RNA, 20 nt, synthetic construct
  misc_feature 1..20: note = source = /note="Description of Artificial Sequence: Synthetic oligonucleotide"
  source 1..20: mol_type = other RNA
agatgattaaaggaatatat

SEQ ID NO: 6067 - RNA, 20 nt, synthetic construct
  misc_feature 1..20: note = source = /note="Description of Artificial Sequence: Synthetic oligonucleotide"
  source 1..20: mol_type = other RNA
atagaacttagcaagtgatt

SEQ ID NO: 6068 - RNA, 20 nt, synthetic construct
  misc_feature 1..20: note = source = /note="Description of Artificial Sequence: Synthetic oligonucleotide"
  source 1..20: mol_type = other RNA
tgaagtgctagagaaaataa

SEQ ID NO: 6069 - RNA, 20 nt, synthetic construct
  misc_feature 1..20: note = source = /note="Description of Artificial Sequence: Synthetic oligonucleotide"
  source 1..20: mol_type = other RNA
gaagtgctagagaaaataaa

SEQ ID NO: 6070 - RNA, 20 nt, synthetic construct
  misc_feature 1..20: note = source = /note="Description of Artificial Sequence: Synthetic oligonucleotide"
  source 1..20: mol_type = other RNA
aagtgctagagaaaataaag

SEQ ID NO: 6071 - RNA, 20 nt, synthetic construct
  misc_feature 1..20: note = source = /note="Description of Artificial Sequence: Synthetic oligonucleotide"
  source 1..20: mol_type = other RNA
ttcaattgtttttagcattt

SEQ ID NO: 6072 - RNA, 20 nt, synthetic construct
  misc_feature 1..20: note = source = /note="Description of Artificial Sequence: Synthetic oligonucleotide"
  source 1..20: mol_type = other RNA
attttggcaaaaaattattt

SEQ ID NO: 6073 - RNA, 20 nt, synthetic construct
  misc_feature 1..20: note = source = /note="Description of Artificial Sequence: Synthetic oligonucleotide"
  source 1..20: mol_type = other RNA
tatgaacttcccacattagc

SEQ ID NO: 6074 - RNA, 20 nt, synthetic construct
  misc_feature 1..20: note = source = /note="Description of Artificial Sequence: Synthetic oligonucleotide"
  source 1..20: mol_type = other RNA
aatatcagtttgctatgtct

SEQ ID NO: 6075 - RNA, 20 nt, synthetic construct
  misc_feature 1..20: note = source = /note="Description of Artificial Sequence: Synthetic oligonucleotide"
  source 1..20: mol_type = other RNA
agagagattaccattacatt

SEQ ID NO: 6076 - RNA, 20 nt, synthetic construct
  misc_feature 1..20: note = source = /note="Description of Artificial Sequence: Synthetic oligonucleotide"
  source 1..20: mol_type = other RNA
gtaacttgaagttgaagttt

SEQ ID NO: 6077 - RNA, 20 nt, synthetic construct
  misc_feature 1..20: note = source = /note="Description of Artificial Sequence: Synthetic oligonucleotide"
  source 1..20: mol_type = other RNA
ggtaacttgaagttgaagtt

SEQ ID NO: 6078 - RNA, 20 nt, synthetic construct
  misc_feature 1..20: note = source = /note="Description of Artificial Sequence: Synthetic oligonucleotide"
  source 1..20: mol_type = other RNA
aaagtatttgagagggtgca

SEQ ID NO: 6079 - RNA, 20 nt, synthetic construct
  misc_feature 1..20: note = source = /note="Description of Artificial Sequence: Synthetic oligonucleotide"
  source 1..20: mol_type = other RNA
aaaagtatttgagagggtgc

SEQ ID NO: 6080 - RNA, 20 nt, synthetic construct
  misc_feature 1..20: note = source = /note="Description of Artificial Sequence: Synthetic oligonucleotide"
  source 1..20: mol_type = other RNA
ataaagaaaagtatttgaga

SEQ ID NO: 6081 - RNA, 20 nt, synthetic construct
  misc_feature 1..20: note = source = /note="Description of Artificial Sequence: Synthetic oligonucleotide"
  source 1..20: mol_type = other RNA
aataaagaaaagtatttgag

SEQ ID NO: 6082 - RNA, 20 nt, synthetic construct
  misc_feature 1..20: note = source = /note="Description of Artificial Sequence: Synthetic oligonucleotide"
  source 1..20: mol_type = other RNA
gcgataaatactctaacaac

SEQ ID NO: 6083 - RNA, 20 nt, synthetic construct
  misc_feature 1..20: note = source = /note="Description of Artificial Sequence: Synthetic oligonucleotide"
  source 1..20: mol_type = other RNA
ctacaagtgaagcaaaatgg

SEQ ID NO: 6084 - RNA, 20 nt, synthetic construct
  misc_feature 1..20: note = source = /note="Description of Artificial Sequence: Synthetic oligonucleotide"
  source 1..20: mol_type = other RNA
tggctacaagtgaagcaaaa

SEQ ID NO: 6085 - RNA, 20 nt, synthetic construct
  misc_feature 1..20: note = source = /note="Description of Artificial Sequence: Synthetic oligonucleotide"
  source 1..20: mol_type = other RNA
ttaacaagattgagacgaag

SEQ ID NO: 6086 - RNA, 20 nt, synthetic construct
  misc_feature 1..20: note = source = /note="Description of Artificial Sequence: Synthetic oligonucleotide"
  source 1..20: mol_type = other RNA
aaccacaaataccatttatt

SEQ ID NO: 6087 - RNA, 20 nt, synthetic construct
  misc_feature 1..20: note = source = /note="Description of Artificial Sequence: Synthetic oligonucleotide"
  source 1..20: mol_type = other RNA
actgactagccaggtgcagg

SEQ ID NO: 6088 - RNA, 20 nt, synthetic construct
  misc_feature 1..20: note = source = /note="Description of Artificial Sequence: Synthetic oligonucleotide"
  source 1..20: mol_type = other RNA
aagactgactagccaggtgc

SEQ ID NO: 6089 - RNA, 20 nt, synthetic construct
  misc_feature 1..20: note = source = /note="Description of Artificial Sequence: Synthetic oligonucleotide"
  source 1..20: mol_type = other RNA
tgtcacaagactgactagcc

SEQ ID NO: 6090 - RNA, 20 nt, synthetic construct
  misc_feature 1..20: note = source = /note="Description of Artificial Sequence: Synthetic oligonucleotide"
  source 1..20: mol_type = other RNA
ttagttctctgctagttcta

SEQ ID NO: 6091 - RNA, 20 nt, synthetic construct
  misc_feature 1..20: note = source = /note="Description of Artificial Sequence: Synthetic oligonucleotide"
  source 1..20: mol_type = other RNA
gtcctcaaagtctcgtcgga

SEQ ID NO: 6092 - RNA, 20 nt, synthetic construct
  misc_feature 1..20: note = source = /note="Description of Artificial Sequence: Synthetic oligonucleotide"
  source 1..20: mol_type = other RNA
ggtcctcaaagtctcgtcgg

SEQ ID NO: 6093 - RNA, 20 nt, synthetic construct
  misc_feature 1..20: note = source = /note="Description of Artificial Sequence: Synthetic oligonucleotide"
  source 1..20: mol_type = other RNA
gtcctactaccgaacttggg

SEQ ID NO: 6094 - RNA, 20 nt, synthetic construct
  misc_feature 1..20: note = source = /note="Description of Artificial Sequence: Synthetic oligonucleotide"
  source 1..20: mol_type = other RNA
ttctccgattccgtcctact

SEQ ID NO: 6095 - RNA, 20 nt, synthetic construct
  misc_feature 1..20: note = source = /note="Description of Artificial Sequence: Synthetic oligonucleotide"
  source 1..20: mol_type = other RNA
cgaggaattctccgattccg

SEQ ID NO: 6096 - RNA, 20 nt, synthetic construct
  misc_feature 1..20: note = source = /note="Description of Artificial Sequence: Synthetic oligonucleotide"
  source 1..20: mol_type = other RNA
gggtcgaggaattctccgat

SEQ ID NO: 6097 - RNA, 20 nt, synthetic construct
  misc_feature 1..20: note = source = /note="Description of Artificial Sequence: Synthetic oligonucleotide"
  source 1..20: mol_type = other RNA
acattagggtcgaggaattc

SEQ ID NO: 6098 - RNA, 20 nt, synthetic construct
  misc_feature 1..20: note = source = /note="Description of Artificial Sequence: Synthetic oligonucleotide"
  source 1..20: mol_type = other RNA
atcatatgaagacccggacc

SEQ ID NO: 6099 - RNA, 20 nt, synthetic construct
  misc_feature 1..20: note = source = /note="Description of Artificial Sequence: Synthetic oligonucleotide"
  source 1..20: mol_type = other RNA
aatcatatgaagacccggac

SEQ ID NO: 6100 - RNA, 20 nt, synthetic construct
  misc_feature 1..20: note = source = /note="Description of Artificial Sequence: Synthetic oligonucleotide"
  source 1..20: mol_type = other RNA
aaatcatatgaagacccgga

SEQ ID NO: 6101 - RNA, 20 nt, synthetic construct
  misc_feature 1..20: note = source = /note="Description of Artificial Sequence: Synthetic oligonucleotide"
  source 1..20: mol_type = other RNA
aaaatcatatgaagacccgg

SEQ ID NO: 6102 - RNA, 20 nt, synthetic construct
  misc_feature 1..20: note = source = /note="Description of Artificial Sequence: Synthetic oligonucleotide"
  source 1..20: mol_type = other RNA
ttcagaaaatcatatgaaga

SEQ ID NO: 6103 - RNA, 20 nt, synthetic construct
  misc_feature 1..20: note = source = /note="Description of Artificial Sequence: Synthetic oligonucleotide"
  source 1..20: mol_type = other RNA
tttcagaaaatcatatgaag

SEQ ID NO: 6104 - RNA, 20 nt, synthetic construct
  misc_feature 1..20: note = source = /note="Description of Artificial Sequence: Synthetic oligonucleotide"
  source 1..20: mol_type = other RNA
ttgggacactcagcaggtca

SEQ ID NO: 6105 - RNA, 20 nt, synthetic construct
  misc_feature 1..20: note = source = /note="Description of Artificial Sequence: Synthetic oligonucleotide"
  source 1..20: mol_type = other RNA
cttaggttgggacactcagc

SEQ ID NO: 6106 - RNA, 20 nt, synthetic construct
  misc_feature 1..20: note = source = /note="Description of Artificial Sequence: Synthetic oligonucleotide"
  source 1..20: mol_type = other RNA
ggtctgacaacccttaggtt

SEQ ID NO: 6107 - RNA, 20 nt, synthetic construct
  misc_feature 1..20: note = source = /note="Description of Artificial Sequence: Synthetic oligonucleotide"
  source 1..20: mol_type = other RNA
tggtctgacaacccttaggt

SEQ ID NO: 6108 - RNA, 20 nt, synthetic construct
  misc_feature 1..20: note = source = /note="Description of Artificial Sequence: Synthetic oligonucleotide"
  source 1..20: mol_type = other RNA
aaaatggtctgacaaccctt

SEQ ID NO: 6109 - RNA, 20 nt, synthetic construct
  misc_feature 1..20: note = source = /note="Description of Artificial Sequence: Synthetic oligonucleotide"
  source 1..20: mol_type = other RNA
tacatgcatatatgagaaaa

SEQ ID NO: 6110 - RNA, 20 nt, synthetic construct
  misc_feature 1..20: note = source = /note="Description of Artificial Sequence: Synthetic oligonucleotide"
  source 1..20: mol_type = other RNA
ttaactgtcttatatagttc

SEQ ID NO: 6111 - RNA, 20 nt, synthetic construct
  misc_feature 1..20: note = source = /note="Description of Artificial Sequence: Synthetic oligonucleotide"
  source 1..20: mol_type = other RNA
aagctgaattacctactaaa

SEQ ID NO: 6112 - RNA, 20 nt, synthetic construct
  misc_feature 1..20: note = source = /note="Description of Artificial Sequence: Synthetic oligonucleotide"
  source 1..20: mol_type = other RNA
ggcagagattagagctatac

SEQ ID NO: 6113 - RNA, 20 nt, synthetic construct
  misc_feature 1..20: note = source = /note="Description of Artificial Sequence: Synthetic oligonucleotide"
  source 1..20: mol_type = other RNA
atcctcaggtgtctgcagta

SEQ ID NO: 6114 - RNA, 20 nt, synthetic construct
  misc_feature 1..20: note = source = /note="Description of Artificial Sequence: Synthetic oligonucleotide"
  source 1..20: mol_type = other RNA
gagtggatacttatatcctc

SEQ ID NO: 6115 - RNA, 20 nt, synthetic construct
  misc_feature 1..20: note = source = /note="Description of Artificial Sequence: Synthetic oligonucleotide"
  source 1..20: mol_type = other RNA
agaagtatcaagtggcagag

SEQ ID NO: 6116 - RNA, 20 nt, synthetic construct
  misc_feature 1..20: note = source = /note="Description of Artificial Sequence: Synthetic oligonucleotide"
  source 1..20: mol_type = other RNA
agtctctgagaagtatcaag

SEQ ID NO: 6117 - RNA, 20 nt, synthetic construct
  misc_feature 1..20: note = source = /note="Description of Artificial Sequence: Synthetic oligonucleotide"
  source 1..20: mol_type = other RNA
caactgaggacacactggaa

SEQ ID NO: 6118 - RNA, 20 nt, synthetic construct
  misc_feature 1..20: note = source = /note="Description of Artificial Sequence: Synthetic oligonucleotide"
  source 1..20: mol_type = other RNA
gagttcaactgaggacacac

SEQ ID NO: 6119 - RNA, 20 nt, synthetic construct
  misc_feature 1..20: note = source = /note="Description of Artificial Sequence: Synthetic oligonucleotide"
  source 1..20: mol_type = other RNA
gaatcatgggagttcaactg

SEQ ID NO: 6120 - RNA, 20 nt, synthetic construct
  misc_feature 1..20: note = source = /note="Description of Artificial Sequence: Synthetic oligonucleotide"
  source 1..20: mol_type = other RNA
tggcaacatccaggaatcat

SEQ ID NO: 6121 - RNA, 20 nt, synthetic construct
  misc_feature 1..20: note = source = /note="Description of Artificial Sequence: Synthetic oligonucleotide"
  source 1..20: mol_type = other RNA
atggcaacatccaggaatca

SEQ ID NO: 6122 - RNA, 20 nt, synthetic construct
  misc_feature 1..20: note = source = /note="Description of Artificial Sequence: Synthetic oligonucleotide"
  source 1..20: mol_type = other RNA
tcttgaaaatggcaacatcc

SEQ ID NO: 6123 - RNA, 20 nt, synthetic construct
  misc_feature 1..20: note = source = /note="Description of Artificial Sequence: Synthetic oligonucleotide"
  source 1..20: mol_type = other RNA
cttgccctgtgtcttgaaaa

SEQ ID NO: 6124 - RNA, 20 nt, synthetic construct
  misc_feature 1..20: note = source = /note="Description of Artificial Sequence: Synthetic oligonucleotide"
  source 1..20: mol_type = other RNA
ttaaaattcccaaggtagag

SEQ ID NO: 6125 - RNA, 20 nt, synthetic construct
  misc_feature 1..20: note = source = /note="Description of Artificial Sequence: Synthetic oligonucleotide"
  source 1..20: mol_type = other RNA
agagtgacttaaaattccca

SEQ ID NO: 6126 - RNA, 20 nt, synthetic construct
  misc_feature 1..20: note = source = /note="Description of Artificial Sequence: Synthetic oligonucleotide"
  source 1..20: mol_type = other RNA
taaaaatattaacatgcaag

SEQ ID NO: 6127 - RNA, 20 nt, synthetic construct
  misc_feature 1..20: note = source = /note="Description of Artificial Sequence: Synthetic oligonucleotide"
  source 1..20: mol_type = other RNA
ctaaaaatattaacatgcaa

SEQ ID NO: 6128 - RNA, 20 nt, synthetic construct
  misc_feature 1..20: note = source = /note="Description of Artificial Sequence: Synthetic oligonucleotide"
  source 1..20: mol_type = other RNA
tctaaaaatattaacatgca

SEQ ID NO: 6129 - RNA, 20 nt, synthetic construct
  misc_feature 1..20: note = source = /note="Description of Artificial Sequence: Synthetic oligonucleotide"
  source 1..20: mol_type = other RNA
tccagcatgagaggggaaag

SEQ ID NO: 6130 - RNA, 20 nt, synthetic construct
  misc_feature 1..20: note = source = /note="Description of Artificial Sequence: Synthetic oligonucleotide"
  source 1..20: mol_type = other RNA
aagattttccagcatgagag

SEQ ID NO: 6131 - RNA, 20 nt, synthetic construct
  misc_feature 1..20: note = source = /note="Description of Artificial Sequence: Synthetic oligonucleotide"
  source 1..20: mol_type = other RNA
taagattttccagcatgaga

SEQ ID NO: 6132 - RNA, 20 nt, synthetic construct
  misc_feature 1..20: note = source = /note="Description of Artificial Sequence: Synthetic oligonucleotide"
  source 1..20: mol_type = other RNA
ctaagattttccagcatgag

SEQ ID NO: 6133 - RNA, 20 nt, synthetic construct
  misc_feature 1..20: note = source = /note="Description of Artificial Sequence: Synthetic oligonucleotide"
  source 1..20: mol_type = other RNA
agcaatcatcaagggaggag

SEQ ID NO: 6134 - RNA, 20 nt, synthetic construct
  misc_feature 1..20: note = source = /note="Description of Artificial Sequence: Synthetic oligonucleotide"
  source 1..20: mol_type = other RNA
aagcaatcatcaagggagga

SEQ ID NO: 6135 - RNA, 20 nt, synthetic construct
  misc_feature 1..20: note = source = /note="Description of Artificial Sequence: Synthetic oligonucleotide"
  source 1..20: mol_type = other RNA
aaagcaatcatcaagggagg

SEQ ID NO: 6136 - RNA, 20 nt, synthetic construct
  misc_feature 1..20: note = source = /note="Description of Artificial Sequence: Synthetic oligonucleotide"
  source 1..20: mol_type = other RNA
ggtaaagcaatcatcaaggg

SEQ ID NO: 6137 - RNA, 20 nt, synthetic construct
  misc_feature 1..20: note = source = /note="Description of Artificial Sequence: Synthetic oligonucleotide"
  source 1..20: mol_type = other RNA
tgaggtaaagcaatcatcaa

SEQ ID NO: 6138 - RNA, 20 nt, synthetic construct
  misc_feature 1..20: note = source = /note="Description of Artificial Sequence: Synthetic oligonucleotide"
  source 1..20: mol_type = other RNA
gtgaggtaaagcaatcatca

SEQ ID NO: 6139 - RNA, 20 nt, synthetic construct
  misc_feature 1..20: note = source = /note="Description of Artificial Sequence: Synthetic oligonucleotide"
  source 1..20: mol_type = other RNA
gtcacagttctcacagagtg

SEQ ID NO: 6140 - RNA, 20 nt, synthetic construct
  misc_feature 1..20: note = source = /note="Description of Artificial Sequence: Synthetic oligonucleotide"
  source 1..20: mol_type = other RNA
atgttatgacttcattaagg

SEQ ID NO: 6141 - RNA, 20 nt, synthetic construct
  misc_feature 1..20: note = source = /note="Description of Artificial Sequence: Synthetic oligonucleotide"
  source 1..20: mol_type = other RNA
ctaatgttatgacttcatta

SEQ ID NO: 6142 - RNA, 20 nt, synthetic construct
  misc_feature 1..20: note = source = /note="Description of Artificial Sequence: Synthetic oligonucleotide"
  source 1..20: mol_type = other RNA
ctgcactttattccttaccc

SEQ ID NO: 6143 - RNA, 20 nt, synthetic construct
  misc_feature 1..20: note = source = /note="Description of Artificial Sequence: Synthetic oligonucleotide"
  source 1..20: mol_type = other RNA
tgtaaaaccttttccctcaa

SEQ ID NO: 6144 - RNA, 20 nt, synthetic construct
  misc_feature 1..20: note = source = /note="Description of Artificial Sequence: Synthetic oligonucleotide"
  source 1..20: mol_type = other RNA
agatttttgaggagatatga

SEQ ID NO: 6145 - RNA, 20 nt, synthetic construct
  misc_feature 1..20: note = source = /note="Description of Artificial Sequence: Synthetic oligonucleotide"
  source 1..20: mol_type = other RNA
aagatttttgaggagatatg

SEQ ID NO: 6146 - RNA, 20 nt, synthetic construct
  misc_feature 1..20: note = source = /note="Description of Artificial Sequence: Synthetic oligonucleotide"
  source 1..20: mol_type = other RNA
aatgcaaaacaagatttttg

SEQ ID NO: 6147 - RNA, 20 nt, synthetic construct
  misc_feature 1..20: note = source = /note="Description of Artificial Sequence: Synthetic oligonucleotide"
  source 1..20: mol_type = other RNA
tgctattgaaaatatgtcaa

SEQ ID NO: 6148 - RNA, 20 nt, synthetic construct
  misc_feature 1..20: note = source = /note="Description of Artificial Sequence: Synthetic oligonucleotide"
  source 1..20: mol_type = other RNA
ttgctattgaaaatatgtca

SEQ ID NO: 6149 - RNA, 20 nt, synthetic construct
  misc_feature 1..20: note = source = /note="Description of Artificial Sequence: Synthetic oligonucleotide"
  source 1..20: mol_type = other RNA
tactactaaaaataaactct

SEQ ID NO: 6150 - RNA, 20 nt, synthetic construct
  misc_feature 1..20: note = source = /note="Description of Artificial Sequence: Synthetic oligonucleotide"
  source 1..20: mol_type = other RNA
taaatttcgtcccgaatgtc

SEQ ID NO: 6151 - RNA, 20 nt, synthetic construct
  misc_feature 1..20: note = source = /note="Description of Artificial Sequence: Synthetic oligonucleotide"
  source 1..20: mol_type = other RNA
gaagaaacggtaaatttcgt

SEQ ID NO: 6152 - RNA, 20 nt, synthetic construct
  misc_feature 1..20: note = source = /note="Description of Artificial Sequence: Synthetic oligonucleotide"
  source 1..20: mol_type = other RNA
agaagaaacggtaaatttcg

SEQ ID NO: 6153 - RNA, 20 nt, synthetic construct
  misc_feature 1..20: note = source = /note="Description of Artificial Sequence: Synthetic oligonucleotide"
  source 1..20: mol_type = other RNA
gatatacaacccgttacatg

SEQ ID NO: 6154 - RNA, 20 nt, synthetic construct
  misc_feature 1..20: note = source = /note="Description of Artificial Sequence: Synthetic oligonucleotide"
  source 1..20: mol_type = other RNA
aactcttgaatgatatacaa

SEQ ID NO: 6155 - RNA, 20 nt, synthetic construct
  misc_feature 1..20: note = source = /note="Description of Artificial Sequence: Synthetic oligonucleotide"
  source 1..20: mol_type = other RNA
taactcttgaatgatataca

SEQ ID NO: 6156 - RNA, 20 nt, synthetic construct
  misc_feature 1..20: note = source = /note="Description of Artificial Sequence: Synthetic oligonucleotide"
  source 1..20: mol_type = other RNA
aaaagcaacattaataaaag

SEQ ID NO: 6157 - RNA, 20 nt, synthetic construct
  misc_feature 1..20: note = source = /note="Description of Artificial Sequence: Synthetic oligonucleotide"
  source 1..20: mol_type = other RNA
ttctcacggaccataaaccg

SEQ ID NO: 6158 - RNA, 20 nt, synthetic construct
  misc_feature 1..20: note = source = /note="Description of Artificial Sequence: Synthetic oligonucleotide"
  source 1..20: mol_type = other RNA
gatcttctcacggaccataa

SEQ ID NO: 6159 - RNA, 20 nt, synthetic construct
  misc_feature 1..20: note = source = /note="Description of Artificial Sequence: Synthetic oligonucleotide"
  source 1..20: mol_type = other RNA
gatcaaggatcttctcacgg

SEQ ID NO: 6160 - RNA, 20 nt, synthetic construct
  misc_feature 1..20: note = source = /note="Description of Artificial Sequence: Synthetic oligonucleotide"
  source 1..20: mol_type = other RNA
tacctaagattcgagttgtt

SEQ ID NO: 6161 - RNA, 20 nt, synthetic construct
  misc_feature 1..20: note = source = /note="Description of Artificial Sequence: Synthetic oligonucleotide"
  source 1..20: mol_type = other RNA
ttacctaagattcgagttgt

SEQ ID NO: 6162 - RNA, 20 nt, synthetic construct
  misc_feature 1..20: note = source = /note="Description of Artificial Sequence: Synthetic oligonucleotide"
  source 1..20: mol_type = other RNA
cacagacagagaatgagatt

SEQ ID NO: 6163 - RNA, 20 nt, synthetic construct
  misc_feature 1..20: note = source = /note="Description of Artificial Sequence: Synthetic oligonucleotide"
  source 1..20: mol_type = other RNA
aaaattttgaatcgtgaaga

SEQ ID NO: 6164 - RNA, 20 nt, synthetic construct
  misc_feature 1..20: note = source = /note="Description of Artificial Sequence: Synthetic oligonucleotide"
  source 1..20: mol_type = other RNA
ttaaggaagtctattgaagt

SEQ ID NO: 6165 - RNA, 20 nt, synthetic construct
  misc_feature 1..20: note = source = /note="Description of Artificial Sequence: Synthetic oligonucleotide"
  source 1..20: mol_type = other RNA
ttttagatgaggtccagaaa

SEQ ID NO: 6166 - RNA, 20 nt, synthetic construct
  misc_feature 1..20: note = source = /note="Description of Artificial Sequence: Synthetic oligonucleotide"
  source 1..20: mol_type = other RNA
ataaaaccttttagatgagg

SEQ ID NO: 6167 - RNA, 20 nt, synthetic construct
  misc_feature 1..20: note = source = /note="Description of Artificial Sequence: Synthetic oligonucleotide"
  source 1..20: mol_type = other RNA
ctcctctgttatagtccaga

SEQ ID NO: 6168 - RNA, 20 nt, synthetic construct
  misc_feature 1..20: note = source = /note="Description of Artificial Sequence: Synthetic oligonucleotide"
  source 1..20: mol_type = other RNA
cttcctgtccttcaggatcc

SEQ ID NO: 6169 - RNA, 20 nt, synthetic construct
  misc_feature 1..20: note = source = /note="Description of Artificial Sequence: Synthetic oligonucleotide"
  source 1..20: mol_type = other RNA
cccaattcttcctgtccttc

SEQ ID NO: 6170 - RNA, 20 nt, synthetic construct
  misc_feature 1..20: note = source = /note="Description of Artificial Sequence: Synthetic oligonucleotide"
  source 1..20: mol_type = other RNA
cccctccacttctctccact

SEQ ID NO: 6171 - RNA, 20 nt, synthetic construct
  misc_feature 1..20: note = source = /note="Description of Artificial Sequence: Synthetic oligonucleotide"
  source 1..20: mol_type = other RNA
tcccctccacttctctccac

SEQ ID NO: 6172 - RNA, 20 nt, synthetic construct
  misc_feature 1..20: note = source = /note="Description of Artificial Sequence: Synthetic oligonucleotide"
  source 1..20: mol_type = other RNA
ctggcccattcctgccctaa

SEQ ID NO: 6173 - RNA, 20 nt, synthetic construct
  misc_feature 1..20: note = source = /note="Description of Artificial Sequence: Synthetic oligonucleotide"
  source 1..20: mol_type = other RNA
cttcccacttgccctctgcc

SEQ ID NO: 6174 - RNA, 20 nt, synthetic construct
  misc_feature 1..20: note = source = /note="Description of Artificial Sequence: Synthetic oligonucleotide"
  source 1..20: mol_type = other RNA
gccaacatgaactttataca

SEQ ID NO: 6175 - RNA, 20 nt, synthetic construct
  misc_feature 1..20: note = source = /note="Description of Artificial Sequence: Synthetic oligonucleotide"
  source 1..20: mol_type = other RNA
ctttaggattttactaaatt

SEQ ID NO: 6176 - RNA, 20 nt, synthetic construct
  misc_feature 1..20: note = source = /note="Description of Artificial Sequence: Synthetic oligonucleotide"
  source 1..20: mol_type = other RNA
ataatctttagcttgacttt

SEQ ID NO: 6177 - RNA, 20 nt, synthetic construct
  misc_feature 1..20: note = source = /note="Description of Artificial Sequence: Synthetic oligonucleotide"
  source 1..20: mol_type = other RNA
aattattccccaatattttc

SEQ ID NO: 6178 - RNA, 20 nt, synthetic construct
  misc_feature 1..20: note = source = /note="Description of Artificial Sequence: Synthetic oligonucleotide"
  source 1..20: mol_type = other RNA
tgtactatgttagtattaca

SEQ ID NO: 6179 - RNA, 20 nt, synthetic construct
  misc_feature 1..20: note = source = /note="Description of Artificial Sequence: Synthetic oligonucleotide"
  source 1..20: mol_type = other RNA
tattataaaaatacaaaatt

SEQ ID NO: 6180 - RNA, 20 nt, synthetic construct
  misc_feature 1..20: note = source = /note="Description of Artificial Sequence: Synthetic oligonucleotide"
  source 1..20: mol_type = other RNA
aacctgatcgactacagatt

SEQ ID NO: 6181 - RNA, 20 nt, synthetic construct
  misc_feature 1..20: note = source = /note="Description of Artificial Sequence: Synthetic oligonucleotide"
  source 1..20: mol_type = other RNA
gaaggtgttttacttgatta

SEQ ID NO: 6182 - RNA, 20 nt, synthetic construct
  misc_feature 1..20: note = source = /note="Description of Artificial Sequence: Synthetic oligonucleotide"
  source 1..20: mol_type = other RNA
atttcagtacattgtagaga

SEQ ID NO: 6183 - RNA, 20 nt, synthetic construct
  misc_feature 1..20: note = source = /note="Description of Artificial Sequence: Synthetic oligonucleotide"
  source 1..20: mol_type = other RNA
tatttcagtacattgtagag

SEQ ID NO: 6184 - RNA, 20 nt, synthetic construct
  misc_feature 1..20: note = source = /note="Description of Artificial Sequence: Synthetic oligonucleotide"
  source 1..20: mol_type = other RNA
aatctatgatcgatctccgt

SEQ ID NO: 6185 - RNA, 20 nt, synthetic construct
  misc_feature 1..20: note = source = /note="Description of Artificial Sequence: Synthetic oligonucleotide"
  source 1..20: mol_type = other RNA
ggttcaatctatgatcgatc

SEQ ID NO: 6186 - RNA, 20 nt, synthetic construct
  misc_feature 1..20: note = source = /note="Description of Artificial Sequence: Synthetic oligonucleotide"
  source 1..20: mol_type = other RNA
gagtctcagtatcctctgga

SEQ ID NO: 6187 - RNA, 20 nt, synthetic construct
  misc_feature 1..20: note = source = /note="Description of Artificial Sequence: Synthetic oligonucleotide"
  source 1..20: mol_type = other RNA
agagtctcagtatcctctgg

SEQ ID NO: 6188 - RNA, 20 nt, synthetic construct
  misc_feature 1..20: note = source = /note="Description of Artificial Sequence: Synthetic oligonucleotide"
  source 1..20: mol_type = other RNA
gcaggaggagagtctcagta

SEQ ID NO: 6189 - RNA, 20 nt, synthetic construct
  misc_feature 1..20: note = source = /note="Description of Artificial Sequence: Synthetic oligonucleotide"
  source 1..20: mol_type = other RNA
attatttttttattagcagg

SEQ ID NO: 6190 - RNA, 20 nt, synthetic construct
  misc_feature 1..20: note = source = /note="Description of Artificial Sequence: Synthetic oligonucleotide"
  source 1..20: mol_type = other RNA
tttattatttttttattagc

SEQ ID NO: 6191 - RNA, 20 nt, synthetic construct
  misc_feature 1..20: note = source = /note="Description of Artificial Sequence: Synthetic oligonucleotide"
  source 1..20: mol_type = other RNA
ggctacaagagagtgctaac

SEQ ID NO: 6192 - RNA, 20 nt, synthetic construct
  misc_feature 1..20: note = source = /note="Description of Artificial Sequence: Synthetic oligonucleotide"
  source 1..20: mol_type = other RNA
gtgtatgttaattagaaaaa

SEQ ID NO: 6193 - RNA, 20 nt, synthetic construct
  misc_feature 1..20: note = source = /note="Description of Artificial Sequence: Synthetic oligonucleotide"
  source 1..20: mol_type = other RNA
tagatctgtttcatgagaaa

SEQ ID NO: 6194 - RNA, 20 nt, synthetic construct
  misc_feature 1..20: note = source = /note="Description of Artificial Sequence: Synthetic oligonucleotide"
  source 1..20: mol_type = other RNA
ttagatctgtttcatgagaa

SEQ ID NO: 6195 - RNA, 20 nt, synthetic construct
  misc_feature 1..20: note = source = /note="Description of Artificial Sequence: Synthetic oligonucleotide"
  source 1..20: mol_type = other RNA
cttcaacaatgactaaaggt

SEQ ID NO: 6196 - RNA, 20 nt, synthetic construct
  misc_feature 1..20: note = source = /note="Description of Artificial Sequence: Synthetic oligonucleotide"
  source 1..20: mol_type = other RNA
acttcaacaatgactaaagg

SEQ ID NO: 6197 - RNA, 20 nt, synthetic construct
  misc_feature 1..20: note = source = /note="Description of Artificial Sequence: Synthetic oligonucleotide"
  source 1..20: mol_type = other RNA
gaaacttcaacaatgactaa

SEQ ID NO: 6198 - RNA, 20 nt, synthetic construct
  misc_feature 1..20: note = source = /note="Description of Artificial Sequence: Synthetic oligonucleotide"
  source 1..20: mol_type = other RNA
aaaagataacattgtaaatc

SEQ ID NO: 6199 - RNA, 20 nt, synthetic construct
  misc_feature 1..20: note = source = /note="Description of Artificial Sequence: Synthetic oligonucleotide"
  source 1..20: mol_type = other RNA
ctgtagggtgatggtttttt

SEQ ID NO: 6200 - RNA, 20 nt, synthetic construct
  misc_feature 1..20: note = source = /note="Description of Artificial Sequence: Synthetic oligonucleotide"
  source 1..20: mol_type = other RNA
cctgtagggtgatggttttt

SEQ ID NO: 6201 - RNA, 20 nt, synthetic construct
  misc_feature 1..20: note = source = /note="Description of Artificial Sequence: Synthetic oligonucleotide"
  source 1..20: mol_type = other RNA
atttatttcctgtagggtga

SEQ ID NO: 6202 - RNA, 20 nt, synthetic construct
  misc_feature 1..20: note = source = /note="Description of Artificial Sequence: Synthetic oligonucleotide"
  source 1..20: mol_type = other RNA
agtgtgatttatttcctgta

SEQ ID NO: 6203 - RNA, 20 nt, synthetic construct
  misc_feature 1..20: note = source = /note="Description of Artificial Sequence: Synthetic oligonucleotide"
  source 1..20: mol_type = other RNA
gagtgtgatttatttcctgt

SEQ ID NO: 6204 - RNA, 20 nt, synthetic construct
  misc_feature 1..20: note = source = /note="Description of Artificial Sequence: Synthetic oligonucleotide"
  source 1..20: mol_type = other RNA
gagaaatcagtagccagatc

SEQ ID NO: 6205 - RNA, 20 nt, synthetic construct
  misc_feature 1..20: note = source = /note="Description of Artificial Sequence: Synthetic oligonucleotide"
  source 1..20: mol_type = other RNA
aagtcttaaagtctaagtat

SEQ ID NO: 6206 - RNA, 20 nt, synthetic construct
  misc_feature 1..20: note = source = /note="Description of Artificial Sequence: Synthetic oligonucleotide"
  source 1..20: mol_type = other RNA
gttcataagaatgacctgta

SEQ ID NO: 6207 - RNA, 20 nt, synthetic construct
  misc_feature 1..20: note = source = /note="Description of Artificial Sequence: Synthetic oligonucleotide"
  source 1..20: mol_type = other RNA
gcttgctagaacaatgacta

SEQ ID NO: 6208 - RNA, 20 nt, synthetic construct
  misc_feature 1..20: note = source = /note="Description of Artificial Sequence: Synthetic oligonucleotide"
  source 1..20: mol_type = other RNA
actcaaagaataaactgctc

SEQ ID NO: 6209 - RNA, 20 nt, synthetic construct
  misc_feature 1..20: note = source = /note="Description of Artificial Sequence: Synthetic oligonucleotide"
  source 1..20: mol_type = other RNA
gcactgtattatgatctcta

SEQ ID NO: 6210 - RNA, 20 nt, synthetic construct
  misc_feature 1..20: note = source = /note="Description of Artificial Sequence: Synthetic oligonucleotide"
  source 1..20: mol_type = other RNA
tacatgtctgctcacttgct

SEQ ID NO: 6211 - RNA, 20 nt, synthetic construct
  misc_feature 1..20: note = source = /note="Description of Artificial Sequence: Synthetic oligonucleotide"
  source 1..20: mol_type = other RNA
ataccatgtggcatgtgtaa

SEQ ID NO: 6212 - RNA, 20 nt, synthetic construct
  misc_feature 1..20: note = source = /note="Description of Artificial Sequence: Synthetic oligonucleotide"
  source 1..20: mol_type = other RNA
atgacttgtatcataccatg

SEQ ID NO: 6213 - RNA, 20 nt, synthetic construct
  misc_feature 1..20: note = source = /note="Description of Artificial Sequence: Synthetic oligonucleotide"
  source 1..20: mol_type = other RNA
caagacaccatgtataagag

SEQ ID NO: 6214 - RNA, 20 nt, synthetic construct
  misc_feature 1..20: note = source = /note="Description of Artificial Sequence: Synthetic oligonucleotide"
  source 1..20: mol_type = other RNA
gagactactgataccactct

SEQ ID NO: 6215 - RNA, 20 nt, synthetic construct
  misc_feature 1..20: note = source = /note="Description of Artificial Sequence: Synthetic oligonucleotide"
  source 1..20: mol_type = other RNA
agagactactgataccactc

SEQ ID NO: 6216 - RNA, 20 nt, synthetic construct
  misc_feature 1..20: note = source = /note="Description of Artificial Sequence: Synthetic oligonucleotide"
  source 1..20: mol_type = other RNA
gatgtttaattcagtctctt

SEQ ID NO: 6217 - RNA, 20 nt, synthetic construct
  misc_feature 1..20: note = source = /note="Description of Artificial Sequence: Synthetic oligonucleotide"
  source 1..20: mol_type = other RNA
agatgtttaattcagtctct

SEQ ID NO: 6218 - RNA, 20 nt, synthetic construct
  misc_feature 1..20: note = source = /note="Description of Artificial Sequence: Synthetic oligonucleotide"
  source 1..20: mol_type = other RNA
cagtctatttacggtgttct

SEQ ID NO: 6219 - RNA, 20 nt, synthetic construct
  misc_feature 1..20: note = source = /note="Description of Artificial Sequence: Synthetic oligonucleotide"
  source 1..20: mol_type = other RNA
acacttaaatccctaacggt

SEQ ID NO: 6220 - RNA, 20 nt, synthetic construct
  misc_feature 1..20: note = source = /note="Description of Artificial Sequence: Synthetic oligonucleotide"
  source 1..20: mol_type = other RNA
atgtcgataaacacttaaat

SEQ ID NO: 6221 - RNA, 20 nt, synthetic construct
  misc_feature 1..20: note = source = /note="Description of Artificial Sequence: Synthetic oligonucleotide"
  source 1..20: mol_type = other RNA
tatgtcgataaacacttaaa

SEQ ID NO: 6222 - RNA, 20 nt, synthetic construct
  misc_feature 1..20: note = source = /note="Description of Artificial Sequence: Synthetic oligonucleotide"
  source 1..20: mol_type = other RNA
atcaaaggacacatcatatg

SEQ ID NO: 6223 - RNA, 20 nt, synthetic construct
  misc_feature 1..20: note = source = /note="Description of Artificial Sequence: Synthetic oligonucleotide"
  source 1..20: mol_type = other RNA
tttacttgttctaaaatcaa

SEQ ID NO: 6224 - RNA, 20 nt, synthetic construct
  misc_feature 1..20: note = source = /note="Description of Artificial Sequence: Synthetic oligonucleotide"
  source 1..20: mol_type = other RNA
atcacttttactgaaagtat

SEQ ID NO: 6225 - RNA, 20 nt, synthetic construct
  misc_feature 1..20: note = source = /note="Description of Artificial Sequence: Synthetic oligonucleotide"
  source 1..20: mol_type = other RNA
actataaagtggaaaactac

SEQ ID NO: 6226 - RNA, 20 nt, synthetic construct
  misc_feature 1..20: note = source = /note="Description of Artificial Sequence: Synthetic oligonucleotide"
  source 1..20: mol_type = other RNA
tttctaggactctagttgtc

SEQ ID NO: 6227 - RNA, 20 nt, synthetic construct
  misc_feature 1..20: note = source = /note="Description of Artificial Sequence: Synthetic oligonucleotide"
  source 1..20: mol_type = other RNA
cacattttgagaaaaatgtc

SEQ ID NO: 6228 - RNA, 20 nt, synthetic construct
  misc_feature 1..20: note = source = /note="Description of Artificial Sequence: Synthetic oligonucleotide"
  source 1..20: mol_type = other RNA
gttagagggtgtctatgact

SEQ ID NO: 6229 - RNA, 20 nt, synthetic construct
  misc_feature 1..20: note = source = /note="Description of Artificial Sequence: Synthetic oligonucleotide"
  source 1..20: mol_type = other RNA
aactataggtaccccccagg

SEQ ID NO: 6230 - RNA, 20 nt, synthetic construct
  misc_feature 1..20: note = source = /note="Description of Artificial Sequence: Synthetic oligonucleotide"
  source 1..20: mol_type = other RNA
gtctaaaactataggtaccc

SEQ ID NO: 6231 - RNA, 20 nt, synthetic construct
  misc_feature 1..20: note = source = /note="Description of Artificial Sequence: Synthetic oligonucleotide"
  source 1..20: mol_type = other RNA
tgtctaaaactataggtacc

SEQ ID NO: 6232 - RNA, 20 nt, synthetic construct
  misc_feature 1..20: note = source = /note="Description of Artificial Sequence: Synthetic oligonucleotide"
  source 1..20: mol_type = other RNA
gtgtctaaaactataggtac

SEQ ID NO: 6233 - RNA, 20 nt, synthetic construct
  misc_feature 1..20: note = source = /note="Description of Artificial Sequence: Synthetic oligonucleotide"
  source 1..20: mol_type = other RNA
ggtgtctaaaactataggta

SEQ ID NO: 6234 - RNA, 20 nt, synthetic construct
  misc_feature 1..20: note = source = /note="Description of Artificial Sequence: Synthetic oligonucleotide"
  source 1..20: mol_type = other RNA
aggtgtctaaaactataggt

SEQ ID NO: 6235 - RNA, 20 nt, synthetic construct
  misc_feature 1..20: note = source = /note="Description of Artificial Sequence: Synthetic oligonucleotide"
  source 1..20: mol_type = other RNA
ataaaatatattctctgaac

SEQ ID NO: 6236 - RNA, 20 nt, synthetic construct
  misc_feature 1..20: note = source = /note="Description of Artificial Sequence: Synthetic oligonucleotide"
  source 1..20: mol_type = other RNA
tactaagcttcatataccct

SEQ ID NO: 6237 - RNA, 20 nt, synthetic construct
  misc_feature 1..20: note = source = /note="Description of Artificial Sequence: Synthetic oligonucleotide"
  source 1..20: mol_type = other RNA
ctactaagcttcatataccc

SEQ ID NO: 6238 - RNA, 20 nt, synthetic construct
  misc_feature 1..20: note = source = /note="Description of Artificial Sequence: Synthetic oligonucleotide"
  source 1..20: mol_type = other RNA
tctctactaagcttcatata

SEQ ID NO: 6239 - RNA, 20 nt, synthetic construct
  misc_feature 1..20: note = source = /note="Description of Artificial Sequence: Synthetic oligonucleotide"
  source 1..20: mol_type = other RNA
ctctctactaagcttcatat

SEQ ID NO: 6240 - RNA, 20 nt, synthetic construct
  misc_feature 1..20: note = source = /note="Description of Artificial Sequence: Synthetic oligonucleotide"
  source 1..20: mol_type = other RNA
attattgatgaatgtatcgt

SEQ ID NO: 6241 - RNA, 20 nt, synthetic construct
  misc_feature 1..20: note = source = /note="Description of Artificial Sequence: Synthetic oligonucleotide"
  source 1..20: mol_type = other RNA
gttttatgagtctttttttt

SEQ ID NO: 6242 - RNA, 20 nt, synthetic construct
  misc_feature 1..20: note = source = /note="Description of Artificial Sequence: Synthetic oligonucleotide"
  source 1..20: mol_type = other RNA
aagtacctaaggtcgtagac

SEQ ID NO: 6243 - RNA, 20 nt, synthetic construct
  misc_feature 1..20: note = source = /note="Description of Artificial Sequence: Synthetic oligonucleotide"
  source 1..20: mol_type = other RNA
gtcggggggtacccataagt

SEQ ID NO: 6244 - RNA, 20 nt, synthetic construct
  misc_feature 1..20: note = source = /note="Description of Artificial Sequence: Synthetic oligonucleotide"
  source 1..20: mol_type = other RNA
cattattcagtcggggggta

SEQ ID NO: 6245 - RNA, 20 nt, synthetic construct
  misc_feature 1..20: note = source = /note="Description of Artificial Sequence: Synthetic oligonucleotide"
  source 1..20: mol_type = other RNA
acattattcagtcggggggt

SEQ ID NO: 6246 - RNA, 20 nt, synthetic construct
  misc_feature 1..20: note = source = /note="Description of Artificial Sequence: Synthetic oligonucleotide"
  source 1..20: mol_type = other RNA
tcaaggactatacgtgtcct

SEQ ID NO: 6247 - RNA, 20 nt, synthetic construct
  misc_feature 1..20: note = source = /note="Description of Artificial Sequence: Synthetic oligonucleotide"
  source 1..20: mol_type = other RNA
aagactcctaccaagattca

SEQ ID NO: 6248 - RNA, 20 nt, synthetic construct
  misc_feature 1..20: note = source = /note="Description of Artificial Sequence: Synthetic oligonucleotide"
  source 1..20: mol_type = other RNA
gagtcaagatcttgagaaga

SEQ ID NO: 6249 - RNA, 20 nt, synthetic construct
  misc_feature 1..20: note = source = /note="Description of Artificial Sequence: Synthetic oligonucleotide"
  source 1..20: mol_type = other RNA
gcacgtgtacaagtgggggt

SEQ ID NO: 6250 - RNA, 20 nt, synthetic construct
  misc_feature 1..20: note = source = /note="Description of Artificial Sequence: Synthetic oligonucleotide"
  source 1..20: mol_type = other RNA
atgtgcacgtgtacaagtgg

SEQ ID NO: 6251 - RNA, 20 nt, synthetic construct
  misc_feature 1..20: note = source = /note="Description of Artificial Sequence: Synthetic oligonucleotide"
  source 1..20: mol_type = other RNA
tatgtgcacgtgtacaagtg

SEQ ID NO: 6252 - RNA, 20 nt, synthetic construct
  misc_feature 1..20: note = source = /note="Description of Artificial Sequence: Synthetic oligonucleotide"
  source 1..20: mol_type = other RNA
gtatgtgcacgtgtacaagt

SEQ ID NO: 6253 - RNA, 20 nt, synthetic construct
  misc_feature 1..20: note = source = /note="Description of Artificial Sequence: Synthetic oligonucleotide"
  source 1..20: mol_type = other RNA
agtatgtgcacgtgtacaag

SEQ ID NO: 6254 - RNA, 20 nt, synthetic construct
  misc_feature 1..20: note = source = /note="Description of Artificial Sequence: Synthetic oligonucleotide"
  source 1..20: mol_type = other RNA
ccactcgtcctgaattcctt

SEQ ID NO: 6255 - RNA, 20 nt, synthetic construct
  misc_feature 1..20: note = source = /note="Description of Artificial Sequence: Synthetic oligonucleotide"
  source 1..20: mol_type = other RNA
accactcgtcctgaattcct

SEQ ID NO: 6256 - RNA, 20 nt, synthetic construct
  misc_feature 1..20: note = source = /note="Description of Artificial Sequence: Synthetic oligonucleotide"
  source 1..20: mol_type = other RNA
ttcgaccactcgtcctgaat

SEQ ID NO: 6257 - RNA, 20 nt, synthetic construct
  misc_feature 1..20: note = source = /note="Description of Artificial Sequence: Synthetic oligonucleotide"
  source 1..20: mol_type = other RNA
atccttcgttcgaccactcg

SEQ ID NO: 6258 - RNA, 20 nt, synthetic construct
  misc_feature 1..20: note = source = /note="Description of Artificial Sequence: Synthetic oligonucleotide"
  source 1..20: mol_type = other RNA
gttacgttatccttcgttcg

SEQ ID NO: 6259 - RNA, 20 nt, synthetic construct
  misc_feature 1..20: note = source = /note="Description of Artificial Sequence: Synthetic oligonucleotide"
  source 1..20: mol_type = other RNA
aacttacgagagttacgtta

SEQ ID NO: 6260 - RNA, 20 nt, synthetic construct
  misc_feature 1..20: note = source = /note="Description of Artificial Sequence: Synthetic oligonucleotide"
  source 1..20: mol_type = other RNA
ccatcttcaagaaccagatg

SEQ ID NO: 6261 - RNA, 20 nt, synthetic construct
  misc_feature 1..20: note = source = /note="Description of Artificial Sequence: Synthetic oligonucleotide"
  source 1..20: mol_type = other RNA
tttttataccatcttcaaga

SEQ ID NO: 6262 - RNA, 20 nt, synthetic construct
  misc_feature 1..20: note = source = /note="Description of Artificial Sequence: Synthetic oligonucleotide"
  source 1..20: mol_type = other RNA
gcccatctccacctttttat

SEQ ID NO: 6263 - RNA, 20 nt, synthetic construct
  misc_feature 1..20: note = source = /note="Description of Artificial Sequence: Synthetic oligonucleotide"
  source 1..20: mol_type = other RNA
actgtgttttgcccatctcc

SEQ ID NO: 6264 - RNA, 20 nt, synthetic construct
  misc_feature 1..20: note = source = /note="Description of Artificial Sequence: Synthetic oligonucleotide"
  source 1..20: mol_type = other RNA
taaactgtgttttgcccatc

SEQ ID NO: 6265 - RNA, 20 nt, synthetic construct
  misc_feature 1..20: note = source = /note="Description of Artificial Sequence: Synthetic oligonucleotide"
  source 1..20: mol_type = other RNA
tatgtctaaactgtgttttg

SEQ ID NO: 6266 - RNA, 20 nt, synthetic construct
  misc_feature 1..20: note = source = /note="Description of Artificial Sequence: Synthetic oligonucleotide"
  source 1..20: mol_type = other RNA
atatgtctaaactgtgtttt

SEQ ID NO: 6267 - RNA, 20 nt, synthetic construct
  misc_feature 1..20: note = source = /note="Description of Artificial Sequence: Synthetic oligonucleotide"
  source 1..20: mol_type = other RNA
gatatgtctaaactgtgttt

SEQ ID NO: 6268 - RNA, 20 nt, synthetic construct
  misc_feature 1..20: note = source = /note="Description of Artificial Sequence: Synthetic oligonucleotide"
  source 1..20: mol_type = other RNA
actctgaagaatgaaaagaa

SEQ ID NO: 6269 - RNA, 20 nt, synthetic construct
  misc_feature 1..20: note = source = /note="Description of Artificial Sequence: Synthetic oligonucleotide"
  source 1..20: mol_type = other RNA
taggaaataatttatggaag

SEQ ID NO: 6270 - RNA, 20 nt, synthetic construct
  misc_feature 1..20: note = source = /note="Description of Artificial Sequence: Synthetic oligonucleotide"
  source 1..20: mol_type = other RNA
aacaattaggaaataattta

SEQ ID NO: 6271 - RNA, 20 nt, synthetic construct
  misc_feature 1..20: note = source = /note="Description of Artificial Sequence: Synthetic oligonucleotide"
  source 1..20: mol_type = other RNA
cagaggcagagggaacaatt

SEQ ID NO: 6272 - RNA, 20 nt, synthetic construct
  misc_feature 1..20: note = source = /note="Description of Artificial Sequence: Synthetic oligonucleotide"
  source 1..20: mol_type = other RNA
aaaaaaagaacagaggcaga

SEQ ID NO: 6273 - RNA, 20 nt, synthetic construct
  misc_feature 1..20: note = source = /note="Description of Artificial Sequence: Synthetic oligonucleotide"
  source 1..20: mol_type = other RNA
aaaaaaaagaacagaggcag

SEQ ID NO: 6274 - RNA, 20 nt, synthetic construct
  misc_feature 1..20: note = source = /note="Description of Artificial Sequence: Synthetic oligonucleotide"
  source 1..20: mol_type = other RNA
agaaaaaaaaaaaagaacag

SEQ ID NO: 6275 - RNA, 20 nt, synthetic construct
  misc_feature 1..20: note = source = /note="Description of Artificial Sequence: Synthetic oligonucleotide"
  source 1..20: mol_type = other RNA
acttaagaatgggcatacag

SEQ ID NO: 6276 - RNA, 20 nt, synthetic construct
  misc_feature 1..20: note = source = /note="Description of Artificial Sequence: Synthetic oligonucleotide"
  source 1..20: mol_type = other RNA
tcagatttgcacttaagaat

SEQ ID NO: 6277 - RNA, 20 nt, synthetic construct
  misc_feature 1..20: note = source = /note="Description of Artificial Sequence: Synthetic oligonucleotide"
  source 1..20: mol_type = other RNA
gtcagatttgcacttaagaa

SEQ ID NO: 6278 - RNA, 20 nt, synthetic construct
  misc_feature 1..20: note = source = /note="Description of Artificial Sequence: Synthetic oligonucleotide"
  source 1..20: mol_type = other RNA
atattaagaaggggtataga

SEQ ID NO: 6279 - RNA, 20 nt, synthetic construct
  misc_feature 1..20: note = source = /note="Description of Artificial Sequence: Synthetic oligonucleotide"
  source 1..20: mol_type = other RNA
aaagaaaggatattaagaag

SEQ ID NO: 6280 - RNA, 20 nt, synthetic construct
  misc_feature 1..20: note = source = /note="Description of Artificial Sequence: Synthetic oligonucleotide"
  source 1..20: mol_type = other RNA
aaaagaaaggatattaagaa

SEQ ID NO: 6281 - RNA, 20 nt, synthetic construct
  misc_feature 1..20: note = source = /note="Description of Artificial Sequence: Synthetic oligonucleotide"
  source 1..20: mol_type = other RNA
taaaagaaaggatattaaga

SEQ ID NO: 6282 - RNA, 20 nt, synthetic construct
  misc_feature 1..20: note = source = /note="Description of Artificial Sequence: Synthetic oligonucleotide"
  source 1..20: mol_type = other RNA
aatgggtatccataaaagaa

SEQ ID NO: 6283 - RNA, 20 nt, synthetic construct
  misc_feature 1..20: note = source = /note="Description of Artificial Sequence: Synthetic oligonucleotide"
  source 1..20: mol_type = other RNA
cctttaataaagtctgaaat

SEQ ID NO: 6284 - RNA, 20 nt, synthetic construct
  misc_feature 1..20: note = source = /note="Description of Artificial Sequence: Synthetic oligonucleotide"
  source 1..20: mol_type = other RNA
tcctttaataaagtctgaaa

SEQ ID NO: 6285 - RNA, 20 nt, synthetic construct
  misc_feature 1..20: note = source = /note="Description of Artificial Sequence: Synthetic oligonucleotide"
  source 1..20: mol_type = other RNA
caagtggtgaggtggggagg

SEQ ID NO: 6286 - RNA, 20 nt, synthetic construct
  misc_feature 1..20: note = source = /note="Description of Artificial Sequence: Synthetic oligonucleotide"
  source 1..20: mol_type = other RNA
tcaagtggtgaggtggggag

SEQ ID NO: 6287 - RNA, 20 nt, synthetic construct
  misc_feature 1..20: note = source = /note="Description of Artificial Sequence: Synthetic oligonucleotide"
  source 1..20: mol_type = other RNA
ttcaagtggtgaggtgggga

SEQ ID NO: 6288 - RNA, 20 nt, synthetic construct
  misc_feature 1..20: note = source = /note="Description of Artificial Sequence: Synthetic oligonucleotide"
  source 1..20: mol_type = other RNA
cttcaagtggtgaggtgggg

SEQ ID NO: 6289 - RNA, 20 nt, synthetic construct
  misc_feature 1..20: note = source = /note="Description of Artificial Sequence: Synthetic oligonucleotide"
  source 1..20: mol_type = other RNA
aaacttcaagtggtgaggtg

SEQ ID NO: 6290 - RNA, 20 nt, synthetic construct
  misc_feature 1..20: note = source = /note="Description of Artificial Sequence: Synthetic oligonucleotide"
  source 1..20: mol_type = other RNA
aaaacttcaagtggtgaggt

SEQ ID NO: 6291 - RNA, 20 nt, synthetic construct
  misc_feature 1..20: note = source = /note="Description of Artificial Sequence: Synthetic oligonucleotide"
  source 1..20: mol_type = other RNA
aaaaacttcaagtggtgagg

SEQ ID NO: 6292 - RNA, 20 nt, synthetic construct
  misc_feature 1..20: note = source = /note="Description of Artificial Sequence: Synthetic oligonucleotide"
  source 1..20: mol_type = other RNA
tgcaaaaacttcaagtggtg

SEQ ID NO: 6293 - RNA, 20 nt, synthetic construct
  misc_feature 1..20: note = source = /note="Description of Artificial Sequence: Synthetic oligonucleotide"
  source 1..20: mol_type = other RNA
ctaattgcaaaaacttcaag

SEQ ID NO: 6294 - RNA, 20 nt, synthetic construct
  misc_feature 1..20: note = source = /note="Description of Artificial Sequence: Synthetic oligonucleotide"
  source 1..20: mol_type = other RNA
actctgaaaaggggataagt

SEQ ID NO: 6295 - RNA, 20 nt, synthetic construct
  misc_feature 1..20: note = source = /note="Description of Artificial Sequence: Synthetic oligonucleotide"
  source 1..20: mol_type = other RNA
ttcagggccactctgaaaag

SEQ ID NO: 6296 - RNA, 20 nt, synthetic construct
  misc_feature 1..20: note = source = /note="Description of Artificial Sequence: Synthetic oligonucleotide"
  source 1..20: mol_type = other RNA
attcagggccactctgaaaa

SEQ ID NO: 6297 - RNA, 20 nt, synthetic construct
  misc_feature 1..20: note = source = /note="Description of Artificial Sequence: Synthetic oligonucleotide"
  source 1..20: mol_type = other RNA
tattcagggccactctgaaa

SEQ ID NO: 6298 - RNA, 20 nt, synthetic construct
  misc_feature 1..20: note = source = /note="Description of Artificial Sequence: Synthetic oligonucleotide"
  source 1..20: mol_type = other RNA
tgggttcacagagctattca

SEQ ID NO: 6299 - RNA, 20 nt, synthetic construct
  misc_feature 1..20: note = source = /note="Description of Artificial Sequence: Synthetic oligonucleotide"
  source 1..20: mol_type = other RNA
ctgggttcacagagctattc

SEQ ID NO: 6300 - RNA, 20 nt, synthetic construct
  misc_feature 1..20: note = source = /note="Description of Artificial Sequence: Synthetic oligonucleotide"
  source 1..20: mol_type = other RNA
actgagttcttcagattcct

SEQ ID NO: 6301 - RNA, 20 nt, synthetic construct
  misc_feature 1..20: note = source = /note="Description of Artificial Sequence: Synthetic oligonucleotide"
  source 1..20: mol_type = other RNA
tactgagttcttcagattcc

SEQ ID NO: 6302 - RNA, 20 nt, synthetic construct
  misc_feature 1..20: note = source = /note="Description of Artificial Sequence: Synthetic oligonucleotide"
  source 1..20: mol_type = other RNA
atctactttctgtaggctga

SEQ ID NO: 6303 - RNA, 20 nt, synthetic construct
  misc_feature 1..20: note = source = /note="Description of Artificial Sequence: Synthetic oligonucleotide"
  source 1..20: mol_type = other RNA
gagtttgatctactttctgt

SEQ ID NO: 6304 - RNA, 20 nt, synthetic construct
  misc_feature 1..20: note = source = /note="Description of Artificial Sequence: Synthetic oligonucleotide"
  source 1..20: mol_type = other RNA
gagtaaccaggagccagatc

SEQ ID NO: 6305 - RNA, 20 nt, synthetic construct
  misc_feature 1..20: note = source = /note="Description of Artificial Sequence: Synthetic oligonucleotide"
  source 1..20: mol_type = other RNA
gaggaatttgaagagtaacc

SEQ ID NO: 6306 - RNA, 20 nt, synthetic construct
  misc_feature 1..20: note = source = /note="Description of Artificial Sequence: Synthetic oligonucleotide"
  source 1..20: mol_type = other RNA
gaagggacaatatagtaagg

SEQ ID NO: 6307 - RNA, 20 nt, synthetic construct
  misc_feature 1..20: note = source = /note="Description of Artificial Sequence: Synthetic oligonucleotide"
  source 1..20: mol_type = other RNA
tctgaagggacaatatagta

SEQ ID NO: 6308 - RNA, 20 nt, synthetic construct
  misc_feature 1..20: note = source = /note="Description of Artificial Sequence: Synthetic oligonucleotide"
  source 1..20: mol_type = other RNA
taaagatttacaaatctgaa

SEQ ID NO: 6309 - RNA, 20 nt, synthetic construct
  misc_feature 1..20: note = source = /note="Description of Artificial Sequence: Synthetic oligonucleotide"
  source 1..20: mol_type = other RNA
gtaaagatttacaaatctga

SEQ ID NO: 6310 - RNA, 20 nt, synthetic construct
  misc_feature 1..20: note = source = /note="Description of Artificial Sequence: Synthetic oligonucleotide"
  source 1..20: mol_type = other RNA
gtgtgtaaaatacgatgtca

SEQ ID NO: 6311 - RNA, 20 nt, synthetic construct
  misc_feature 1..20: note = source = /note="Description of Artificial Sequence: Synthetic oligonucleotide"
  source 1..20: mol_type = other RNA
ggagaggaacagcggtacaa

SEQ ID NO: 6312 - RNA, 20 nt, synthetic construct
  misc_feature 1..20: note = source = /note="Description of Artificial Sequence: Synthetic oligonucleotide"
  source 1..20: mol_type = other RNA
gttcatcaggagaggaacag

SEQ ID NO: 6313 - RNA, 20 nt, synthetic construct
  misc_feature 1..20: note = source = /note="Description of Artificial Sequence: Synthetic oligonucleotide"
  source 1..20: mol_type = other RNA
aaagggaagttcatcaggag

SEQ ID NO: 6314 - RNA, 20 nt, synthetic construct
  misc_feature 1..20: note = source = /note="Description of Artificial Sequence: Synthetic oligonucleotide"
  source 1..20: mol_type = other RNA
agagaaaagggaagttcatc

SEQ ID NO: 6315 - RNA, 20 nt, synthetic construct
  misc_feature 1..20: note = source = /note="Description of Artificial Sequence: Synthetic oligonucleotide"
  source 1..20: mol_type = other RNA
gctgtgtagttaagagaaaa

SEQ ID NO: 6316 - RNA, 20 nt, synthetic construct
  misc_feature 1..20: note = source = /note="Description of Artificial Sequence: Synthetic oligonucleotide"
  source 1..20: mol_type = other RNA
agctgtgtagttaagagaaa

SEQ ID NO: 6317 - RNA, 20 nt, synthetic construct
  misc_feature 1..20: note = source = /note="Description of Artificial Sequence: Synthetic oligonucleotide"
  source 1..20: mol_type = other RNA
atgtcattcatcctacaaac

SEQ ID NO: 6318 - RNA, 20 nt, synthetic construct
  misc_feature 1..20: note = source = /note="Description of Artificial Sequence: Synthetic oligonucleotide"
  source 1..20: mol_type = other RNA
ttgtttactgatgtcattca

SEQ ID NO: 6319 - RNA, 20 nt, synthetic construct
  misc_feature 1..20: note = source = /note="Description of Artificial Sequence: Synthetic oligonucleotide"
  source 1..20: mol_type = other RNA
tccttaaagtcttagacgtt

SEQ ID NO: 6320 - RNA, 20 nt, synthetic construct
  misc_feature 1..20: note = source = /note="Description of Artificial Sequence: Synthetic oligonucleotide"
  source 1..20: mol_type = other RNA
gttctacgtcggaaacggga

SEQ ID NO: 6321 - RNA, 20 nt, synthetic construct
  misc_feature 1..20: note = source = /note="Description of Artificial Sequence: Synthetic oligonucleotide"
  source 1..20: mol_type = other RNA
aagttgccagtagggggaga

SEQ ID NO: 6322 - RNA, 20 nt, synthetic construct
  misc_feature 1..20: note = source = /note="Description of Artificial Sequence: Synthetic oligonucleotide"
  source 1..20: mol_type = other RNA
gaagttgccagtagggggag

SEQ ID NO: 6323 - RNA, 20 nt, synthetic construct
  misc_feature 1..20: note = source = /note="Description of Artificial Sequence: Synthetic oligonucleotide"
  source 1..20: mol_type = other RNA
aggaagaagttgccagtagg

SEQ ID NO: 6324 - RNA, 20 nt, synthetic construct
  misc_feature 1..20: note = source = /note="Description of Artificial Sequence: Synthetic oligonucleotide"
  source 1..20: mol_type = other RNA
taggaagaagttgccagtag

SEQ ID NO: 6325 - RNA, 20 nt, synthetic construct
  misc_feature 1..20: note = source = /note="Description of Artificial Sequence: Synthetic oligonucleotide"
  source 1..20: mol_type = other RNA
gtaggaagaagttgccagta

SEQ ID NO: 6326 - RNA, 20 nt, synthetic construct
  misc_feature 1..20: note = source = /note="Description of Artificial Sequence: Synthetic oligonucleotide"
  source 1..20: mol_type = other RNA
agtaggaagaagttgccagt

SEQ ID NO: 6327 - RNA, 20 nt, synthetic construct
  misc_feature 1..20: note = source = /note="Description of Artificial Sequence: Synthetic oligonucleotide"
  source 1..20: mol_type = other RNA
ctgtatctattttaagaagt

SEQ ID NO: 6328 - RNA, 20 nt, synthetic construct
  misc_feature 1..20: note = source = /note="Description of Artificial Sequence: Synthetic oligonucleotide"
  source 1..20: mol_type = other RNA
acctcttccctccacttagt

SEQ ID NO: 6329 - RNA, 20 nt, synthetic construct
  misc_feature 1..20: note = source = /note="Description of Artificial Sequence: Synthetic oligonucleotide"
  source 1..20: mol_type = other RNA
cacctcttccctccacttag

SEQ ID NO: 6330 - RNA, 20 nt, synthetic construct
  misc_feature 1..20: note = source = /note="Description of Artificial Sequence: Synthetic oligonucleotide"
  source 1..20: mol_type = other RNA
cttataattaagtatctctg

SEQ ID NO: 6331 - RNA, 20 nt, synthetic construct
  misc_feature 1..20: note = source = /note="Description of Artificial Sequence: Synthetic oligonucleotide"
  source 1..20: mol_type = other RNA
tactttagtgaaaaaaatgt

SEQ ID NO: 6332 - RNA, 20 nt, synthetic construct
  misc_feature 1..20: note = source = /note="Description of Artificial Sequence: Synthetic oligonucleotide"
  source 1..20: mol_type = other RNA
gcaacacatttaattttgat

SEQ ID NO: 6333 - RNA, 20 nt, synthetic construct
  misc_feature 1..20: note = source = /note="Description of Artificial Sequence: Synthetic oligonucleotide"
  source 1..20: mol_type = other RNA
tattcatgtatttctcacta

SEQ ID NO: 6334 - RNA, 20 nt, synthetic construct
  misc_feature 1..20: note = source = /note="Description of Artificial Sequence: Synthetic oligonucleotide"
  source 1..20: mol_type = other RNA
agaacacaaccaaaaactgc

SEQ ID NO: 6335 - RNA, 20 nt, synthetic construct
  misc_feature 1..20: note = source = /note="Description of Artificial Sequence: Synthetic oligonucleotide"
  source 1..20: mol_type = other RNA
ggacagcactctcaaacata

SEQ ID NO: 6336 - RNA, 20 nt, synthetic construct
  misc_feature 1..20: note = source = /note="Description of Artificial Sequence: Synthetic oligonucleotide"
  source 1..20: mol_type = other RNA
cagccacatcacaaagcacc

SEQ ID NO: 6337 - RNA, 20 nt, synthetic construct
  misc_feature 1..20: note = source = /note="Description of Artificial Sequence: Synthetic oligonucleotide"
  source 1..20: mol_type = other RNA
cactttttactctttggtca

SEQ ID NO: 6338 - RNA, 20 nt, synthetic construct
  misc_feature 1..20: note = source = /note="Description of Artificial Sequence: Synthetic oligonucleotide"
  source 1..20: mol_type = other RNA
tcactttttactctttggtc

SEQ ID NO: 6339 - RNA, 20 nt, synthetic construct
  misc_feature 1..20: note = source = /note="Description of Artificial Sequence: Synthetic oligonucleotide"
  source 1..20: mol_type = other RNA
aagaatcactttttactctt

SEQ ID NO: 6340 - RNA, 20 nt, synthetic construct
  misc_feature 1..20: note = source = /note="Description of Artificial Sequence: Synthetic oligonucleotide"
  source 1..20: mol_type = other RNA
tttactttcctctatagcta

SEQ ID NO: 6341 - RNA, 20 nt, synthetic construct
  misc_feature 1..20: note = source = /note="Description of Artificial Sequence: Synthetic oligonucleotide"
  source 1..20: mol_type = other RNA
tttaattctacatttgatgt

SEQ ID NO: 6342 - RNA, 20 nt, synthetic construct
  misc_feature 1..20: note = source = /note="Description of Artificial Sequence: Synthetic oligonucleotide"
  source 1..20: mol_type = other RNA
atttaattctacatttgatg

SEQ ID NO: 6343 - RNA, 20 nt, synthetic construct
  misc_feature 1..20: note = source = /note="Description of Artificial Sequence: Synthetic oligonucleotide"
  source 1..20: mol_type = other RNA
aaaacctttcagagaccatc

SEQ ID NO: 6344 - RNA, 20 nt, synthetic construct
  misc_feature 1..20: note = source = /note="Description of Artificial Sequence: Synthetic oligonucleotide"
  source 1..20: mol_type = other RNA
ttactctgaaagtgagtaaa

SEQ ID NO: 6345 - RNA, 20 nt, synthetic construct
  misc_feature 1..20: note = source = /note="Description of Artificial Sequence: Synthetic oligonucleotide"
  source 1..20: mol_type = other RNA
cttactctgaaagtgagtaa

SEQ ID NO: 6346 - RNA, 20 nt, synthetic construct
  misc_feature 1..20: note = source = /note="Description of Artificial Sequence: Synthetic oligonucleotide"
  source 1..20: mol_type = other RNA
aacttttggaaaaacagaaa

SEQ ID NO: 6347 - RNA, 20 nt, synthetic construct
  misc_feature 1..20: note = source = /note="Description of Artificial Sequence: Synthetic oligonucleotide"
  source 1..20: mol_type = other RNA
aaacttttggaaaaacagaa

SEQ ID NO: 6348 - RNA, 20 nt, synthetic construct
  misc_feature 1..20: note = source = /note="Description of Artificial Sequence: Synthetic oligonucleotide"
  source 1..20: mol_type = other RNA
ctttcaaaaaataaaacttt

SEQ ID NO: 6349 - RNA, 20 nt, synthetic construct
  misc_feature 1..20: note = source = /note="Description of Artificial Sequence: Synthetic oligonucleotide"
  source 1..20: mol_type = other RNA
taatttttcaaatgtctaaa

SEQ ID NO: 6350 - RNA, 20 nt, synthetic construct
  misc_feature 1..20: note = source = /note="Description of Artificial Sequence: Synthetic oligonucleotide"
  source 1..20: mol_type = other RNA
cttttctacgttgctactct

SEQ ID NO: 6351 - RNA, 20 nt, synthetic construct
  misc_feature 1..20: note = source = /note="Description of Artificial Sequence: Synthetic oligonucleotide"
  source 1..20: mol_type = other RNA
ttattaaatacttactatgt

SEQ ID NO: 6352 - RNA, 20 nt, synthetic construct
  misc_feature 1..20: note = source = /note="Description of Artificial Sequence: Synthetic oligonucleotide"
  source 1..20: mol_type = other RNA
gtcctcactcgatggagtgg

SEQ ID NO: 6353 - RNA, 20 nt, synthetic construct
  misc_feature 1..20: note = source = /note="Description of Artificial Sequence: Synthetic oligonucleotide"
  source 1..20: mol_type = other RNA
agggtttaacgaccctaatg

SEQ ID NO: 6354 - RNA, 20 nt, synthetic construct
  misc_feature 1..20: note = source = /note="Description of Artificial Sequence: Synthetic oligonucleotide"
  source 1..20: mol_type = other RNA
ggagccggagggtttaacga

SEQ ID NO: 6355 - RNA, 20 nt, synthetic construct
  misc_feature 1..20: note = source = /note="Description of Artificial Sequence: Synthetic oligonucleotide"
  source 1..20: mol_type = other RNA
cggagccggagggtttaacg

SEQ ID NO: 6356 - RNA, 20 nt, synthetic construct
  misc_feature 1..20: note = source = /note="Description of Artificial Sequence: Synthetic oligonucleotide"
  source 1..20: mol_type = other RNA
gagtccactaggtgggcgga

SEQ ID NO: 6357 - RNA, 20 nt, synthetic construct
  misc_feature 1..20: note = source = /note="Description of Artificial Sequence: Synthetic oligonucleotide"
  source 1..20: mol_type = other RNA
ccagagtttgagaactggag

SEQ ID NO: 6358 - RNA, 20 nt, synthetic construct
  misc_feature 1..20: note = source = /note="Description of Artificial Sequence: Synthetic oligonucleotide"
  source 1..20: mol_type = other RNA
aaagtggtatgaccagtccg

SEQ ID NO: 6359 - RNA, 20 nt, synthetic construct
  misc_feature 1..20: note = source = /note="Description of Artificial Sequence: Synthetic oligonucleotide"
  source 1..20: mol_type = other RNA
ccccaaagtggtatgaccag

SEQ ID NO: 6360 - RNA, 20 nt, synthetic construct
  misc_feature 1..20: note = source = /note="Description of Artificial Sequence: Synthetic oligonucleotide"
  source 1..20: mol_type = other RNA
ctctaccccaaagtggtatg

SEQ ID NO: 6361 - RNA, 20 nt, synthetic construct
  misc_feature 1..20: note = source = /note="Description of Artificial Sequence: Synthetic oligonucleotide"
  source 1..20: mol_type = other RNA
aacgtaaaaatcatctctac

SEQ ID NO: 6362 - RNA, 20 nt, synthetic construct
  misc_feature 1..20: note = source = /note="Description of Artificial Sequence: Synthetic oligonucleotide"
  source 1..20: mol_type = other RNA
aaacgtaaaaatcatctcta

SEQ ID NO: 6363 - RNA, 20 nt, synthetic construct
  misc_feature 1..20: note = source = /note="Description of Artificial Sequence: Synthetic oligonucleotide"
  source 1..20: mol_type = other RNA
aaaacgtaaaaatcatctct

SEQ ID NO: 6364 - RNA, 20 nt, synthetic construct
  misc_feature 1..20: note = source = /note="Description of Artificial Sequence: Synthetic oligonucleotide"
  source 1..20: mol_type = other RNA
agggctcatcgaccataata

SEQ ID NO: 6365 - RNA, 20 nt, synthetic construct
  misc_feature 1..20: note = source = /note="Description of Artificial Sequence: Synthetic oligonucleotide"
  source 1..20: mol_type = other RNA
cggagtcggagggctcatcg

SEQ ID NO: 6366 - RNA, 20 nt, synthetic construct
  misc_feature 1..20: note = source = /note="Description of Artificial Sequence: Synthetic oligonucleotide"
  source 1..20: mol_type = other RNA
cctcacgttgccgtgctaga

SEQ ID NO: 6367 - RNA, 20 nt, synthetic construct
  misc_feature 1..20: note = source = /note="Description of Artificial Sequence: Synthetic oligonucleotide"
  source 1..20: mol_type = other RNA
aacgagtccgacctcacgtt

SEQ ID NO: 6368 - RNA, 20 nt, synthetic construct
  misc_feature 1..20: note = source = /note="Description of Artificial Sequence: Synthetic oligonucleotide"
  source 1..20: mol_type = other RNA
aagtgagaacaacgagtccg

SEQ ID NO: 6369 - RNA, 20 nt, synthetic construct
  misc_feature 1..20: note = source = /note="Description of Artificial Sequence: Synthetic oligonucleotide"
  source 1..20: mol_type = other RNA
ctcaaagtgagaacaacgag

SEQ ID NO: 6370 - RNA, 20 nt, synthetic construct
  misc_feature 1..20: note = source = /note="Description of Artificial Sequence: Synthetic oligonucleotide"
  source 1..20: mol_type = other RNA
ttgatagttttccttttcat

SEQ ID NO: 6371 - RNA, 20 nt, synthetic construct
  misc_feature 1..20: note = source = /note="Description of Artificial Sequence: Synthetic oligonucleotide"
  source 1..20: mol_type = other RNA
catattttagtttctgactt

SEQ ID NO: 6372 - RNA, 20 nt, synthetic construct
  misc_feature 1..20: note = source = /note="Description of Artificial Sequence: Synthetic oligonucleotide"
  source 1..20: mol_type = other RNA
ttccttctgtctcctttaac

SEQ ID NO: 6373 - RNA, 20 nt, synthetic construct
  misc_feature 1..20: note = source = /note="Description of Artificial Sequence: Synthetic oligonucleotide"
  source 1..20: mol_type = other RNA
attttcttgcccttattttc

SEQ ID NO: 6374 - RNA, 20 nt, synthetic construct
  misc_feature 1..20: note = source = /note="Description of Artificial Sequence: Synthetic oligonucleotide"
  source 1..20: mol_type = other RNA
gttcattttttcagcctaca

SEQ ID NO: 6375 - RNA, 20 nt, synthetic construct
  misc_feature 1..20: note = source = /note="Description of Artificial Sequence: Synthetic oligonucleotide"
  source 1..20: mol_type = other RNA
caaggacgtaccataccttt

SEQ ID NO: 6376 - RNA, 20 nt, synthetic construct
  misc_feature 1..20: note = source = /note="Description of Artificial Sequence: Synthetic oligonucleotide"
  source 1..20: mol_type = other RNA
ccaaggacgtaccatacctt

SEQ ID NO: 6377 - RNA, 20 nt, synthetic construct
  misc_feature 1..20: note = source = /note="Description of Artificial Sequence: Synthetic oligonucleotide"
  source 1..20: mol_type = other RNA
ttcttccaaggacgtaccat

SEQ ID NO: 6378 - RNA, 20 nt, synthetic construct
  misc_feature 1..20: note = source = /note="Description of Artificial Sequence: Synthetic oligonucleotide"
  source 1..20: mol_type = other RNA
gtcatttcttccaaggacgt

SEQ ID NO: 6379 - RNA, 20 nt, synthetic construct
  misc_feature 1..20: note = source = /note="Description of Artificial Sequence: Synthetic oligonucleotide"
  source 1..20: mol_type = other RNA
agaatccttacgtcatttct

SEQ ID NO: 6380 - RNA, 20 nt, synthetic construct
  misc_feature 1..20: note = source = /note="Description of Artificial Sequence: Synthetic oligonucleotide"
  source 1..20: mol_type = other RNA
ccacgatctgatcaggagaa

SEQ ID NO: 6381 - RNA, 20 nt, synthetic construct
  misc_feature 1..20: note = source = /note="Description of Artificial Sequence: Synthetic oligonucleotide"
  source 1..20: mol_type = other RNA
taatggtgttcataggttaa

SEQ ID NO: 6382 - RNA, 20 nt, synthetic construct
  misc_feature 1..20: note = source = /note="Description of Artificial Sequence: Synthetic oligonucleotide"
  source 1..20: mol_type = other RNA
attataattaagtatctctg

SEQ ID NO: 6383 - RNA, 20 nt, synthetic construct
  misc_feature 1..20: note = source = /note="Description of Artificial Sequence: Synthetic oligonucleotide"
  source 1..20: mol_type = other RNA
gcaacacatttaattttggt

SEQ ID NO: 6384 - RNA, 20 nt, synthetic construct
  misc_feature 1..20: note = source = /note="Description of Artificial Sequence: Synthetic oligonucleotide"
  source 1..20: mol_type = other RNA
aactgcaacacatttaattt

SEQ ID NO: 6385 - RNA, 20 nt, synthetic construct
  misc_feature 1..20: note = source = /note="Description of Artificial Sequence: Synthetic oligonucleotide"
  source 1..20: mol_type = other RNA
tttatgttcatcaatactat

SEQ ID NO: 6386 - RNA, 20 nt, synthetic construct
  misc_feature 1..20: note = source = /note="Description of Artificial Sequence: Synthetic oligonucleotide"
  source 1..20: mol_type = other RNA
caccaaactttaatatttaa

SEQ ID NO: 6387 - RNA, 20 nt, synthetic construct
  misc_feature 1..20: note = source = /note="Description of Artificial Sequence: Synthetic oligonucleotide"
  source 1..20: mol_type = other RNA
acaccaaactttaatattta

SEQ ID NO: 6388 - RNA, 20 nt, synthetic construct
  misc_feature 1..20: note = source = /note="Description of Artificial Sequence: Synthetic oligonucleotide"
  source 1..20: mol_type = other RNA
aattagaagagagccctata

SEQ ID NO: 6389 - RNA, 20 nt, synthetic construct
  misc_feature 1..20: note = source = /note="Description of Artificial Sequence: Synthetic oligonucleotide"
  source 1..20: mol_type = other RNA
aattatctacacgtcatagg

SEQ ID NO: 6390 - RNA, 20 nt, synthetic construct
  misc_feature 1..20: note = source = /note="Description of Artificial Sequence: Synthetic oligonucleotide"
  source 1..20: mol_type = other RNA
ttttttctgtttttggaaac

SEQ ID NO: 6391 - RNA, 20 nt, synthetic construct
  misc_feature 1..20: note = source = /note="Description of Artificial Sequence: Synthetic oligonucleotide"
  source 1..20: mol_type = other RNA
tttagtgtcagtgtttcact

SEQ ID NO: 6392 - RNA, 20 nt, synthetic construct
  misc_feature 1..20: note = source = /note="Description of Artificial Sequence: Synthetic oligonucleotide"
  source 1..20: mol_type = other RNA
tccctgaacttctttgttct

SEQ ID NO: 6393 - RNA, 20 nt, synthetic construct
  misc_feature 1..20: note = source = /note="Description of Artificial Sequence: Synthetic oligonucleotide"
  source 1..20: mol_type = other RNA
ggtatttaaaggaatttcct

SEQ ID NO: 6394 - RNA, 20 nt, synthetic construct
  misc_feature 1..20: note = source = /note="Description of Artificial Sequence: Synthetic oligonucleotide"
  source 1..20: mol_type = other RNA
aggtatttaaaggaatttcc

SEQ ID NO: 6395 - RNA, 20 nt, synthetic construct
  misc_feature 1..20: note = source = /note="Description of Artificial Sequence: Synthetic oligonucleotide"
  source 1..20: mol_type = other RNA
taaaggtatttaaaggaatt

SEQ ID NO: 6396 - RNA, 20 nt, synthetic construct
  misc_feature 1..20: note = source = /note="Description of Artificial Sequence: Synthetic oligonucleotide"
  source 1..20: mol_type = other RNA
ttttaagccacttgatggta

SEQ ID NO: 6397 - RNA, 20 nt, synthetic construct
  misc_feature 1..20: note = source = /note="Description of Artificial Sequence: Synthetic oligonucleotide"
  source 1..20: mol_type = other RNA
ttttcttttaagccacttga

SEQ ID NO: 6398 - RNA, 20 nt, synthetic construct
  misc_feature 1..20: note = source = /note="Description of Artificial Sequence: Synthetic oligonucleotide"
  source 1..20: mol_type = other RNA
gtgcacatgaggacttgaat

SEQ ID NO: 6399 - RNA, 20 nt, synthetic construct
  misc_feature 1..20: note = source = /note="Description of Artificial Sequence: Synthetic oligonucleotide"
  source 1..20: mol_type = other RNA
gttgtttgagggtactgggt

SEQ ID NO: 6400 - RNA, 20 nt, synthetic construct
  misc_feature 1..20: note = source = /note="Description of Artificial Sequence: Synthetic oligonucleotide"
  source 1..20: mol_type = other RNA
cccatgatccgaattatgga

SEQ ID NO: 6401 - RNA, 20 nt, synthetic construct
  misc_feature 1..20: note = source = /note="Description of Artificial Sequence: Synthetic oligonucleotide"
  source 1..20: mol_type = other RNA
acccatgatccgaattatgg

SEQ ID NO: 6402 - RNA, 20 nt, synthetic construct
  misc_feature 1..20: note = source = /note="Description of Artificial Sequence: Synthetic oligonucleotide"
  source 1..20: mol_type = other RNA
tttttattgattacccatga

SEQ ID NO: 6403 - RNA, 20 nt, synthetic construct
  misc_feature 1..20: note = source = /note="Description of Artificial Sequence: Synthetic oligonucleotide"
  source 1..20: mol_type = other RNA
ctagtcctttttattgatta

SEQ ID NO: 6404 - RNA, 20 nt, synthetic construct
  misc_feature 1..20: note = source = /note="Description of Artificial Sequence: Synthetic oligonucleotide"
  source 1..20: mol_type = other RNA
cctagtcctttttattgatt

SEQ ID NO: 6405 - RNA, 20 nt, synthetic construct
  misc_feature 1..20: note = source = /note="Description of Artificial Sequence: Synthetic oligonucleotide"
  source 1..20: mol_type = other RNA
caccctcctccctctcctag

SEQ ID NO: 6406 - RNA, 20 nt, synthetic construct
  misc_feature 1..20: note = source = /note="Description of Artificial Sequence: Synthetic oligonucleotide"
  source 1..20: mol_type = other RNA
acctcccaccctcctccctc

SEQ ID NO: 6407 - RNA, 20 nt, synthetic construct
  misc_feature 1..20: note = source = /note="Description of Artificial Sequence: Synthetic oligonucleotide"
  source 1..20: mol_type = other RNA
ctcccacctcccaccctcct

SEQ ID NO: 6408 - RNA, 20 nt, synthetic construct
  misc_feature 1..20: note = source = /note="Description of Artificial Sequence: Synthetic oligonucleotide"
  source 1..20: mol_type = other RNA
tctcccacctcccaccctcc

SEQ ID NO: 6409 - RNA, 20 nt, synthetic construct
  misc_feature 1..20: note = source = /note="Description of Artificial Sequence: Synthetic oligonucleotide"
  source 1..20: mol_type = other RNA
tagtctcccacctcccaccc

SEQ ID NO: 6410 - RNA, 20 nt, synthetic construct
  misc_feature 1..20: note = source = /note="Description of Artificial Sequence: Synthetic oligonucleotide"
  source 1..20: mol_type = other RNA
ggatagtctcccacctccca

SEQ ID NO: 6411 - RNA, 20 nt, synthetic construct
  misc_feature 1..20: note = source = /note="Description of Artificial Sequence: Synthetic oligonucleotide"
  source 1..20: mol_type = other RNA
cggatagtctcccacctccc

SEQ ID NO: 6412 - RNA, 20 nt, synthetic construct
  misc_feature 1..20: note = source = /note="Description of Artificial Sequence: Synthetic oligonucleotide"
  source 1..20: mol_type = other RNA
ccccggatagtctcccacct

SEQ ID NO: 6413 - RNA, 20 nt, synthetic construct
  misc_feature 1..20: note = source = /note="Description of Artificial Sequence: Synthetic oligonucleotide"
  source 1..20: mol_type = other RNA
gccccggatagtctcccacc

SEQ ID NO: 6414 - RNA, 20 nt, synthetic construct
  misc_feature 1..20: note = source = /note="Description of Artificial Sequence: Synthetic oligonucleotide"
  source 1..20: mol_type = other RNA
gtggccccggatagtctccc

SEQ ID NO: 6415 - RNA, 20 nt, synthetic construct
  misc_feature 1..20: note = source = /note="Description of Artificial Sequence: Synthetic oligonucleotide"
  source 1..20: mol_type = other RNA
tgtgtggccccggatagtct

SEQ ID NO: 6416 - RNA, 20 nt, synthetic construct
  misc_feature 1..20: note = source = /note="Description of Artificial Sequence: Synthetic oligonucleotide"
  source 1..20: mol_type = other RNA
gtgtgtggccccggatagtc

SEQ ID NO: 6417 - RNA, 20 nt, synthetic construct
  misc_feature 1..20: note = source = /note="Description of Artificial Sequence: Synthetic oligonucleotide"
  source 1..20: mol_type = other RNA
ctccccttgttgtgtgtggc

SEQ ID NO: 6418 - RNA, 20 nt, synthetic construct
  misc_feature 1..20: note = source = /note="Description of Artificial Sequence: Synthetic oligonucleotide"
  source 1..20: mol_type = other RNA
tctccccttgttgtgtgtgg

SEQ ID NO: 6419 - RNA, 20 nt, synthetic construct
  misc_feature 1..20: note = source = /note="Description of Artificial Sequence: Synthetic oligonucleotide"
  source 1..20: mol_type = other RNA
gtctccccttgttgtgtgtg

SEQ ID NO: 6420 - RNA, 20 nt, synthetic construct
  misc_feature 1..20: note = source = /note="Description of Artificial Sequence: Synthetic oligonucleotide"
  source 1..20: mol_type = other RNA
ctcctgtatacctgtgtctc

SEQ ID NO: 6421 - RNA, 20 nt, synthetic construct
  misc_feature 1..20: note = source = /note="Description of Artificial Sequence: Synthetic oligonucleotide"
  source 1..20: mol_type = other RNA
actcctgtatacctgtgtct

SEQ ID NO: 6422 - RNA, 20 nt, synthetic construct
  misc_feature 1..20: note = source = /note="Description of Artificial Sequence: Synthetic oligonucleotide"
  source 1..20: mol_type = other RNA
tactcctgtatacctgtgtc

SEQ ID NO: 6423 - RNA, 20 nt, synthetic construct
  misc_feature 1..20: note = source = /note="Description of Artificial Sequence: Synthetic oligonucleotide"
  source 1..20: mol_type = other RNA
tcgatttactactcctgtat

SEQ ID NO: 6424 - RNA, 20 nt, synthetic construct
  misc_feature 1..20: note = source = /note="Description of Artificial Sequence: Synthetic oligonucleotide"
  source 1..20: mol_type = other RNA
attcaccctcgatttactac

SEQ ID NO: 6425 - RNA, 20 nt, synthetic construct
  misc_feature 1..20: note = source = /note="Description of Artificial Sequence: Synthetic oligonucleotide"
  source 1..20: mol_type = other RNA
cgtacaagagtgaatattca

SEQ ID NO: 6426 - RNA, 20 nt, synthetic construct
  misc_feature 1..20: note = source = /note="Description of Artificial Sequence: Synthetic oligonucleotide"
  source 1..20: mol_type = other RNA
acgtacaagagtgaatattc

SEQ ID NO: 6427 - RNA, 20 nt, synthetic construct
  misc_feature 1..20: note = source = /note="Description of Artificial Sequence: Synthetic oligonucleotide"
  source 1..20: mol_type = other RNA
ataggtatcgtttgattgta

SEQ ID NO: 6428 - RNA, 20 nt, synthetic construct
  misc_feature 1..20: note = source = /note="Description of Artificial Sequence: Synthetic oligonucleotide"
  source 1..20: mol_type = other RNA
tacctgtacctacctcgacc

SEQ ID NO: 6429 - RNA, 20 nt, synthetic construct
  misc_feature 1..20: note = source = /note="Description of Artificial Sequence: Synthetic oligonucleotide"
  source 1..20: mol_type = other RNA
acgtacctgtacctacctcg

SEQ ID NO: 6430 - RNA, 20 nt, synthetic construct
  misc_feature 1..20: note = source = /note="Description of Artificial Sequence: Synthetic oligonucleotide"
  source 1..20: mol_type = other RNA
caaaaaacgtacctgtacct

SEQ ID NO: 6431 - RNA, 20 nt, synthetic construct
  misc_feature 1..20: note = source = /note="Description of Artificial Sequence: Synthetic oligonucleotide"
  source 1..20: mol_type = other RNA
agtacaaaaaacgtacctgt

SEQ ID NO: 6432 - RNA, 20 nt, synthetic construct
  misc_feature 1..20: note = source = /note="Description of Artificial Sequence: Synthetic oligonucleotide"
  source 1..20: mol_type = other RNA
tattctagtacaaaaaacgt

SEQ ID NO: 6433 - RNA, 20 nt, synthetic construct
  misc_feature 1..20: note = source = /note="Description of Artificial Sequence: Synthetic oligonucleotide"
  source 1..20: mol_type = other RNA
tgacacaatatatatgtggt

SEQ ID NO: 6434 - RNA, 20 nt, synthetic construct
  misc_feature 1..20: note = source = /note="Description of Artificial Sequence: Synthetic oligonucleotide"
  source 1..20: mol_type = other RNA
ttacgggtggttattatctg

SEQ ID NO: 6435 - RNA, 20 nt, synthetic construct
  misc_feature 1..20: note = source = /note="Description of Artificial Sequence: Synthetic oligonucleotide"
  source 1..20: mol_type = other RNA
ataagtgttatcgtttctgt

SEQ ID NO: 6436 - RNA, 20 nt, synthetic construct
  misc_feature 1..20: note = source = /note="Description of Artificial Sequence: Synthetic oligonucleotide"
  source 1..20: mol_type = other RNA
gtgatgacccatatatggtt

SEQ ID NO: 6437 - RNA, 20 nt, synthetic construct
  misc_feature 1..20: note = source = /note="Description of Artificial Sequence: Synthetic oligonucleotide"
  source 1..20: mol_type = other RNA
ttgggtcgttggggtgatga

SEQ ID NO: 6438 - RNA, 20 nt, synthetic construct
  misc_feature 1..20: note = source = /note="Description of Artificial Sequence: Synthetic oligonucleotide"
  source 1..20: mol_type = other RNA
gttgggtcgttggggtgatg

SEQ ID NO: 6439 - RNA, 20 nt, synthetic construct
  misc_feature 1..20: note = source = /note="Description of Artificial Sequence: Synthetic oligonucleotide"
  source 1..20: mol_type = other RNA
catttaatcaagttggtaac

SEQ ID NO: 6440 - RNA, 20 nt, synthetic construct
  misc_feature 1..20: note = source = /note="Description of Artificial Sequence: Synthetic oligonucleotide"
  source 1..20: mol_type = other RNA
ttgtgaatatacgataacca

SEQ ID NO: 6441 - RNA, 20 nt, synthetic construct
  misc_feature 1..20: note = source = /note="Description of Artificial Sequence: Synthetic oligonucleotide"
  source 1..20: mol_type = other RNA
cttgtgaatatacgataacc

SEQ ID NO: 6442 - RNA, 20 nt, synthetic construct
  misc_feature 1..20: note = source = /note="Description of Artificial Sequence: Synthetic oligonucleotide"
  source 1..20: mol_type = other RNA
ttccttgtgaatatacgata

SEQ ID NO: 6443 - RNA, 20 nt, synthetic construct
  misc_feature 1..20: note = source = /note="Description of Artificial Sequence: Synthetic oligonucleotide"
  source 1..20: mol_type = other RNA
atcactccaacgcctctttt

SEQ ID NO: 6444 - RNA, 20 nt, synthetic construct
  misc_feature 1..20: note = source = /note="Description of Artificial Sequence: Synthetic oligonucleotide"
  source 1..20: mol_type = other RNA
tattgtgcaatcactccaac

SEQ ID NO: 6445 - RNA, 20 nt, synthetic construct
  misc_feature 1..20: note = source = /note="Description of Artificial Sequence: Synthetic oligonucleotide"
  source 1..20: mol_type = other RNA
gttttttattgtgcaatcac

SEQ ID NO: 6446 - RNA, 20 nt, synthetic construct
  misc_feature 1..20: note = source = /note="Description of Artificial Sequence: Synthetic oligonucleotide"
  source 1..20: mol_type = other RNA
ggtagagtgtggtcagtcct

SEQ ID NO: 6447 - RNA, 20 nt, synthetic construct
  misc_feature 1..20: note = source = /note="Description of Artificial Sequence: Synthetic oligonucleotide"
  source 1..20: mol_type = other RNA
ctatggtagagtgtggtcag

SEQ ID NO: 6448 - RNA, 20 nt, synthetic construct
  misc_feature 1..20: note = source = /note="Description of Artificial Sequence: Synthetic oligonucleotide"
  source 1..20: mol_type = other RNA
atgttttcttctgtatgtac

SEQ ID NO: 6449 - RNA, 20 nt, synthetic construct
  misc_feature 1..20: note = source = /note="Description of Artificial Sequence: Synthetic oligonucleotide"
  source 1..20: mol_type = other RNA
gggtaactttttcacccgtt

SEQ ID NO: 6450 - RNA, 20 nt, synthetic construct
  misc_feature 1..20: note = source = /note="Description of Artificial Sequence: Synthetic oligonucleotide"
  source 1..20: mol_type = other RNA
ttgtaggggtaactttttca

SEQ ID NO: 6451 - RNA, 20 nt, synthetic construct
  misc_feature 1..20: note = source = /note="Description of Artificial Sequence: Synthetic oligonucleotide"
  source 1..20: mol_type = other RNA
tttgtaggggtaactttttc

SEQ ID NO: 6452 - RNA, 20 nt, synthetic construct
  misc_feature 1..20: note = source = /note="Description of Artificial Sequence: Synthetic oligonucleotide"
  source 1..20: mol_type = other RNA
atattcctagaatttaaatg

SEQ ID NO: 6453 - RNA, 20 nt, synthetic construct
  misc_feature 1..20: note = source = /note="Description of Artificial Sequence: Synthetic oligonucleotide"
  source 1..20: mol_type = other RNA
ttatcataggtcgtagatat

SEQ ID NO: 6454 - RNA, 20 nt, synthetic construct
  misc_feature 1..20: note = source = /note="Description of Artificial Sequence: Synthetic oligonucleotide"
  source 1..20: mol_type = other RNA
tttgtctgttggatgtctta

SEQ ID NO: 6455 - RNA, 20 nt, synthetic construct
  misc_feature 1..20: note = source = /note="Description of Artificial Sequence: Synthetic oligonucleotide"
  source 1..20: mol_type = other RNA
ttttgtctgttggatgtctt

SEQ ID NO: 6456 - RNA, 20 nt, synthetic construct
  misc_feature 1..20: note = source = /note="Description of Artificial Sequence: Synthetic oligonucleotide"
  source 1..20: mol_type = other RNA
cattcgtttttaagtgttta

SEQ ID NO: 6457 - RNA, 20 nt, synthetic construct
  misc_feature 1..20: note = source = /note="Description of Artificial Sequence: Synthetic oligonucleotide"
  source 1..20: mol_type = other RNA
tcattcgtttttaagtgttt

SEQ ID NO: 6458 - RNA, 20 nt, synthetic construct
  misc_feature 1..20: note = source = /note="Description of Artificial Sequence: Synthetic oligonucleotide"
  source 1..20: mol_type = other RNA
aaaaaaaaacagtgtgacct

SEQ ID NO: 6459 - RNA, 20 nt, synthetic construct
  misc_feature 1..20: note = source = /note="Description of Artificial Sequence: Synthetic oligonucleotide"
  source 1..20: mol_type = other RNA
caaaaaaaaacagtgtgacc

SEQ ID NO: 6460 - RNA, 20 nt, synthetic construct
  misc_feature 1..20: note = source = /note="Description of Artificial Sequence: Synthetic oligonucleotide"
  source 1..20: mol_type = other RNA
acatagtggtgtgaggtctg

SEQ ID NO: 6461 - RNA, 20 nt, synthetic construct
  misc_feature 1..20: note = source = /note="Description of Artificial Sequence: Synthetic oligonucleotide"
  source 1..20: mol_type = other RNA
acgaacttgggccttacacc

SEQ ID NO: 6462 - RNA, 20 nt, synthetic construct
  misc_feature 1..20: note = source = /note="Description of Artificial Sequence: Synthetic oligonucleotide"
  source 1..20: mol_type = other RNA
ttaacgaacttgggccttac

SEQ ID NO: 6463 - RNA, 20 nt, synthetic construct
  misc_feature 1..20: note = source = /note="Description of Artificial Sequence: Synthetic oligonucleotide"
  source 1..20: mol_type = other RNA
cgtcttcttaacgaacttgg

SEQ ID NO: 6464 - RNA, 20 nt, synthetic construct
  misc_feature 1..20: note = source = /note="Description of Artificial Sequence: Synthetic oligonucleotide"
  source 1..20: mol_type = other RNA
gggtcgatgagtcctccgac

SEQ ID NO: 6465 - RNA, 20 nt, synthetic construct
  misc_feature 1..20: note = source = /note="Description of Artificial Sequence: Synthetic oligonucleotide"
  source 1..20: mol_type = other RNA
acatcagggtcgatgagtcc

SEQ ID NO: 6466 - RNA, 20 nt, synthetic construct
  misc_feature 1..20: note = source = /note="Description of Artificial Sequence: Synthetic oligonucleotide"
  source 1..20: mol_type = other RNA
cggacatcagggtcgatgag

SEQ ID NO: 6467 - RNA, 20 nt, synthetic construct
  misc_feature 1..20: note = source = /note="Description of Artificial Sequence: Synthetic oligonucleotide"
  source 1..20: mol_type = other RNA
gtttttaatcgacccgtacc

SEQ ID NO: 6468 - RNA, 20 nt, synthetic construct
  misc_feature 1..20: note = source = /note="Description of Artificial Sequence: Synthetic oligonucleotide"
  source 1..20: mol_type = other RNA
tatgtttttaatcgacccgt

SEQ ID NO: 6469 - RNA, 20 nt, synthetic construct
  misc_feature 1..20: note = source = /note="Description of Artificial Sequence: Synthetic oligonucleotide"
  source 1..20: mol_type = other RNA
atttttatgtttttaatcga

SEQ ID NO: 6470 - RNA, 20 nt, synthetic construct
  misc_feature 1..20: note = source = /note="Description of Artificial Sequence: Synthetic oligonucleotide"
  source 1..20: mol_type = other RNA
gatttttatgtttttaatcg

SEQ ID NO: 6471 - RNA, 20 nt, synthetic construct
  misc_feature 1..20: note = source = /note="Description of Artificial Sequence: Synthetic oligonucleotide"
  source 1..20: mol_type = other RNA
tctctggtaggaccggttgt

SEQ ID NO: 6472 - RNA, 20 nt, synthetic construct
  misc_feature 1..20: note = source = /note="Description of Artificial Sequence: Synthetic oligonucleotide"
  source 1..20: mol_type = other RNA
agttctctatctctggtagg

SEQ ID NO: 6473 - RNA, 20 nt, synthetic construct
  misc_feature 1..20: note = source = /note="Description of Artificial Sequence: Synthetic oligonucleotide"
  source 1..20: mol_type = other RNA
cgtgaaaccctccgactccg

SEQ ID NO: 6474 - RNA, 20 nt, synthetic construct
  misc_feature 1..20: note = source = /note="Description of Artificial Sequence: Synthetic oligonucleotide"
  source 1..20: mol_type = other RNA
tcgtgaaaccctccgactcc

SEQ ID NO: 6475 - RNA, 20 nt, synthetic construct
  misc_feature 1..20: note = source = /note="Description of Artificial Sequence: Synthetic oligonucleotide"
  source 1..20: mol_type = other RNA
gggtcgtgaaaccctccgac

SEQ ID NO: 6476 - RNA, 20 nt, synthetic construct
  misc_feature 1..20: note = source = /note="Description of Artificial Sequence: Synthetic oligonucleotide"
  source 1..20: mol_type = other RNA
acattagggtcgtgaaaccc

SEQ ID NO: 6477 - RNA, 20 nt, synthetic construct
  misc_feature 1..20: note = source = /note="Description of Artificial Sequence: Synthetic oligonucleotide"
  source 1..20: mol_type = other RNA
cggacattagggtcgtgaaa

SEQ ID NO: 6478 - RNA, 20 nt, synthetic construct
  misc_feature 1..20: note = source = /note="Description of Artificial Sequence: Synthetic oligonucleotide"
  source 1..20: mol_type = other RNA
tcggacattagggtcgtgaa

SEQ ID NO: 6479 - RNA, 20 nt, synthetic construct
  misc_feature 1..20: note = source = /note="Description of Artificial Sequence: Synthetic oligonucleotide"
  source 1..20: mol_type = other RNA
tgacctggccggtccacacc

SEQ ID NO: 6480 - RNA, 20 nt, synthetic construct
  misc_feature 1..20: note = source = /note="Description of Artificial Sequence: Synthetic oligonucleotide"
  source 1..20: mol_type = other RNA
gtatgacctggccggtccac

SEQ ID NO: 6481 - RNA, 20 nt, synthetic construct
  misc_feature 1..20: note = source = /note="Description of Artificial Sequence: Synthetic oligonucleotide"
  source 1..20: mol_type = other RNA
taaaagtatgacctggccgg

SEQ ID NO: 6482 - RNA, 20 nt, synthetic construct
  misc_feature 1..20: note = source = /note="Description of Artificial Sequence: Synthetic oligonucleotide"
  source 1..20: mol_type = other RNA
ttgattaaaagtatgacctg

SEQ ID NO: 6483 - RNA, 20 nt, synthetic construct
  misc_feature 1..20: note = source = /note="Description of Artificial Sequence: Synthetic oligonucleotide"
  source 1..20: mol_type = other RNA
tttgattaaaagtatgacct

SEQ ID NO: 6484 - RNA, 20 nt, synthetic construct
  misc_feature 1..20: note = source = /note="Description of Artificial Sequence: Synthetic oligonucleotide"
  source 1..20: mol_type = other RNA
ttttgattaaaagtatgacc

SEQ ID NO: 6485 - RNA, 20 nt, synthetic construct
  misc_feature 1..20: note = source = /note="Description of Artificial Sequence: Synthetic oligonucleotide"
  source 1..20: mol_type = other RNA
aacaacatggatttcaaccg

SEQ ID NO: 6486 - RNA, 20 nt, synthetic construct
  misc_feature 1..20: note = source = /note="Description of Artificial Sequence: Synthetic oligonucleotide"
  source 1..20: mol_type = other RNA
ggttgaaggattcaacaaca

SEQ ID NO: 6487 - RNA, 20 nt, synthetic construct
  misc_feature 1..20: note = source = /note="Description of Artificial Sequence: Synthetic oligonucleotide"
  source 1..20: mol_type = other RNA
ctcagtcctcaaggggttga

SEQ ID NO: 6488 - RNA, 20 nt, synthetic construct
  misc_feature 1..20: note = source = /note="Description of Artificial Sequence: Synthetic oligonucleotide"
  source 1..20: mol_type = other RNA
gggaattctcagtcctcaag

SEQ ID NO: 6489 - RNA, 20 nt, synthetic construct
  misc_feature 1..20: note = source = /note="Description of Artificial Sequence: Synthetic oligonucleotide"
  source 1..20: mol_type = other RNA
agggaattctcagtcctcaa

SEQ ID NO: 6490 - RNA, 20 nt, synthetic construct
  misc_feature 1..20: note = source = /note="Description of Artificial Sequence: Synthetic oligonucleotide"
  source 1..20: mol_type = other RNA
aagggaattctcagtcctca

SEQ ID NO: 6491 - RNA, 20 nt, synthetic construct
  misc_feature 1..20: note = source = /note="Description of Artificial Sequence: Synthetic oligonucleotide"
  source 1..20: mol_type = other RNA
gattcagacagataattaaa

SEQ ID NO: 6492 - RNA, 20 nt, synthetic construct
  misc_feature 1..20: note = source = /note="Description of Artificial Sequence: Synthetic oligonucleotide"
  source 1..20: mol_type = other RNA
tgattcagacagataattaa

SEQ ID NO: 6493 - RNA, 20 nt, synthetic construct
  misc_feature 1..20: note = source = /note="Description of Artificial Sequence: Synthetic oligonucleotide"
  source 1..20: mol_type = other RNA
aagagataattttgtttaat

SEQ ID NO: 6494 - RNA, 20 nt, synthetic construct
  misc_feature 1..20: note = source = /note="Description of Artificial Sequence: Synthetic oligonucleotide"
  source 1..20: mol_type = other RNA
cctaaattacacatttgtgg

SEQ ID NO: 6495 - RNA, 20 nt, synthetic construct
  misc_feature 1..20: note = source = /note="Description of Artificial Sequence: Synthetic oligonucleotide"
  source 1..20: mol_type = other RNA
tcctaaattacacatttgtg

SEQ ID NO: 6496 - RNA, 20 nt, synthetic construct
  misc_feature 1..20: note = source = /note="Description of Artificial Sequence: Synthetic oligonucleotide"
  source 1..20: mol_type = other RNA
ttcctaaattacacatttgt

SEQ ID NO: 6497 - RNA, 20 nt, synthetic construct
  misc_feature 1..20: note = source = /note="Description of Artificial Sequence: Synthetic oligonucleotide"
  source 1..20: mol_type = other RNA
attcctaaattacacatttg

SEQ ID NO: 6498 - RNA, 20 nt, synthetic construct
  misc_feature 1..20: note = source = /note="Description of Artificial Sequence: Synthetic oligonucleotide"
  source 1..20: mol_type = other RNA
atactttccttaaacttttt

SEQ ID NO: 6499 - RNA, 20 nt, synthetic construct
  misc_feature 1..20: note = source = /note="Description of Artificial Sequence: Synthetic oligonucleotide"
  source 1..20: mol_type = other RNA
cagtaattgagcactgaaat

SEQ ID NO: 6500 - RNA, 20 nt, synthetic construct
  misc_feature 1..20: note = source = /note="Description of Artificial Sequence: Synthetic oligonucleotide"
  source 1..20: mol_type = other RNA
acagtaattgagcactgaaa

SEQ ID NO: 6501 - RNA, 20 nt, synthetic construct
  misc_feature 1..20: note = source = /note="Description of Artificial Sequence: Synthetic oligonucleotide"
  source 1..20: mol_type = other RNA
ataagcaatacttccacttg

SEQ ID NO: 6502 - RNA, 20 nt, synthetic construct
  misc_feature 1..20: note = source = /note="Description of Artificial Sequence: Synthetic oligonucleotide"
  source 1..20: mol_type = other RNA
gtccttaaaacccctcagta

SEQ ID NO: 6503 - RNA, 20 nt, synthetic construct
  misc_feature 1..20: note = source = /note="Description of Artificial Sequence: Synthetic oligonucleotide"
  source 1..20: mol_type = other RNA
attgaattctagcctcaact

SEQ ID NO: 6504 - RNA, 20 nt, synthetic construct
  misc_feature 1..20: note = source = /note="Description of Artificial Sequence: Synthetic oligonucleotide"
  source 1..20: mol_type = other RNA
tgataccattttaactgtat

SEQ ID NO: 6505 - RNA, 20 nt, synthetic construct
  misc_feature 1..20: note = source = /note="Description of Artificial Sequence: Synthetic oligonucleotide"
  source 1..20: mol_type = other RNA
tttttttttttttttggtcc

SEQ ID NO: 6506 - RNA, 20 nt, synthetic construct
  misc_feature 1..20: note = source = /note="Description of Artificial Sequence: Synthetic oligonucleotide"
  source 1..20: mol_type = other RNA
tttttttttttttttttttt

SEQ ID NO: 6507 - RNA, 20 nt, synthetic construct
  misc_feature 1..20: note = source = /note="Description of Artificial Sequence: Synthetic oligonucleotide"
  source 1..20: mol_type = other RNA
acgtggcgtcagacccgttg

SEQ ID NO: 6508 - RNA, 20 nt, synthetic construct
  misc_feature 1..20: note = source = /note="Description of Artificial Sequence: Synthetic oligonucleotide"
  source 1..20: mol_type = other RNA
tccggtgacgtggcgtcaga

SEQ ID NO: 6509 - RNA, 20 nt, synthetic construct
  misc_feature 1..20: note = source = /note="Description of Artificial Sequence: Synthetic oligonucleotide"
  source 1..20: mol_type = other RNA
gtccggtgacgtggcgtcag

SEQ ID NO: 6510 - RNA, 20 nt, synthetic construct
  misc_feature 1..20: note = source = /note="Description of Artificial Sequence: Synthetic oligonucleotide"
  source 1..20: mol_type = other RNA
ccgacgtcactcggagttag

SEQ ID NO: 6511 - RNA, 20 nt, synthetic construct
  misc_feature 1..20: note = source = /note="Description of Artificial Sequence: Synthetic oligonucleotide"
  source 1..20: mol_type = other RNA
gtggactcggacccttcaac

SEQ ID NO: 6512 - RNA, 20 nt, synthetic construct
  misc_feature 1..20: note = source = /note="Description of Artificial Sequence: Synthetic oligonucleotide"
  source 1..20: mol_type = other RNA
accctcctagtggactcgga

SEQ ID NO: 6513 - RNA, 20 nt, synthetic construct
  misc_feature 1..20: note = source = /note="Description of Artificial Sequence: Synthetic oligonucleotide"
  source 1..20: mol_type = other RNA
caccctcctagtggactcgg

SEQ ID NO: 6514 - RNA, 20 nt, synthetic construct
  misc_feature 1..20: note = source = /note="Description of Artificial Sequence: Synthetic oligonucleotide"
  source 1..20: mol_type = other RNA
tgagaccttcgactccaccc

SEQ ID NO: 6515 - RNA, 20 nt, synthetic construct
  misc_feature 1..20: note = source = /note="Description of Artificial Sequence: Synthetic oligonucleotide"
  source 1..20: mol_type = other RNA
cgatgagaccttcgactcca

SEQ ID NO: 6516 - RNA, 20 nt, synthetic construct
  misc_feature 1..20: note = source = /note="Description of Artificial Sequence: Synthetic oligonucleotide"
  source 1..20: mol_type = other RNA
tcgatgagaccttcgactcc

SEQ ID NO: 6517 - RNA, 20 nt, synthetic construct
  misc_feature 1..20: note = source = /note="Description of Artificial Sequence: Synthetic oligonucleotide"
  source 1..20: mol_type = other RNA
gagtcgatgagaccttcgac

SEQ ID NO: 6518 - RNA, 20 nt, synthetic construct
  misc_feature 1..20: note = source = /note="Description of Artificial Sequence: Synthetic oligonucleotide"
  source 1..20: mol_type = other RNA
gggacaccagagtcgatgag

SEQ ID NO: 6519 - RNA, 20 nt, synthetic construct
  misc_feature 1..20: note = source = /note="Description of Artificial Sequence: Synthetic oligonucleotide"
  source 1..20: mol_type = other RNA
ccccaccaccgtacggggac

SEQ ID NO: 6520 - RNA, 20 nt, synthetic construct
  misc_feature 1..20: note = source = /note="Description of Artificial Sequence: Synthetic oligonucleotide"
  source 1..20: mol_type = other RNA
ttttttaatcggtccccacc

SEQ ID NO: 6521 - RNA, 20 nt, synthetic construct
  misc_feature 1..20: note = source = /note="Description of Artificial Sequence: Synthetic oligonucleotide"
  source 1..20: mol_type = other RNA
atgttttttaatcggtcccc

SEQ ID NO: 6522 - RNA, 20 nt, synthetic construct
  misc_feature 1..20: note = source = /note="Description of Artificial Sequence: Synthetic oligonucleotide"
  source 1..20: mol_type = other RNA
tttatgttttttaatcggtc

SEQ ID NO: 6523 - RNA, 20 nt, synthetic construct
  misc_feature 1..20: note = source = /note="Description of Artificial Sequence: Synthetic oligonucleotide"
  source 1..20: mol_type = other RNA
ttttatgttttttaatcggt

SEQ ID NO: 6524 - RNA, 20 nt, synthetic construct
  misc_feature 1..20: note = source = /note="Description of Artificial Sequence: Synthetic oligonucleotide"
  source 1..20: mol_type = other RNA
tttttatgttttttaatcgg

SEQ ID NO: 6525 - RNA, 20 nt, synthetic construct
  misc_feature 1..20: note = source = /note="Description of Artificial Sequence: Synthetic oligonucleotide"
  source 1..20: mol_type = other RNA
acgcttgtcggacccgttgt

SEQ ID NO: 6526 - RNA, 20 nt, synthetic construct
  misc_feature 1..20: note = source = /note="Description of Artificial Sequence: Synthetic oligonucleotide"
  source 1..20: mol_type = other RNA
gtcctcaaacgcttgtcgga

SEQ ID NO: 6527 - RNA, 20 nt, synthetic construct
  misc_feature 1..20: note = source = /note="Description of Artificial Sequence: Synthetic oligonucleotide"
  source 1..20: mol_type = other RNA
ggtcctcaaacgcttgtcgg

SEQ ID NO: 6528 - RNA, 20 nt, synthetic construct
  misc_feature 1..20: note = source = /note="Description of Artificial Sequence: Synthetic oligonucleotide"
  source 1..20: mol_type = other RNA
gtccacctaacgaactccgg

SEQ ID NO: 6529 - RNA, 20 nt, synthetic construct
  misc_feature 1..20: note = source = /note="Description of Artificial Sequence: Synthetic oligonucleotide"
  source 1..20: mol_type = other RNA
gctccgtccacctaacgaac

SEQ ID NO: 6530 - RNA, 20 nt, synthetic construct
  misc_feature 1..20: note = source = /note="Description of Artificial Sequence: Synthetic oligonucleotide"
  source 1..20: mol_type = other RNA
gaaacccttcggctccgtcc

SEQ ID NO: 6531 - RNA, 20 nt, synthetic construct
  misc_feature 1..20: note = source = /note="Description of Artificial Sequence: Synthetic oligonucleotide"
  source 1..20: mol_type = other RNA
cgtgaaacccttcggctccg

SEQ ID NO: 6532 - RNA, 20 nt, synthetic construct
  misc_feature 1..20: note = source = /note="Description of Artificial Sequence: Synthetic oligonucleotide"
  source 1..20: mol_type = other RNA
aggtcgtgaaacccttcggc

SEQ ID NO: 6533 - RNA, 20 nt, synthetic construct
  misc_feature 1..20: note = source = /note="Description of Artificial Sequence: Synthetic oligonucleotide"
  source 1..20: mol_type = other RNA
agggtattaaggtcgtgaaa

SEQ ID NO: 6534 - RNA, 20 nt, synthetic construct
  misc_feature 1..20: note = source = /note="Description of Artificial Sequence: Synthetic oligonucleotide"
  source 1..20: mol_type = other RNA
aagggtattaaggtcgtgaa

SEQ ID NO: 6535 - RNA, 20 nt, synthetic construct
  misc_feature 1..20: note = source = /note="Description of Artificial Sequence: Synthetic oligonucleotide"
  source 1..20: mol_type = other RNA
gattccggaggccgacccac

SEQ ID NO: 6536 - RNA, 20 nt, synthetic construct
  misc_feature 1..20: note = source = /note="Description of Artificial Sequence: Synthetic oligonucleotide"
  source 1..20: mol_type = other RNA
ctaaagattccggaggccga

SEQ ID NO: 6537 - RNA, 20 nt, synthetic construct
  misc_feature 1..20: note = source = /note="Description of Artificial Sequence: Synthetic oligonucleotide"
  source 1..20: mol_type = other RNA
tctaaagattccggaggccg

SEQ ID NO: 6538 - RNA, 20 nt, synthetic construct
  misc_feature 1..20: note = source = /note="Description of Artificial Sequence: Synthetic oligonucleotide"
  source 1..20: mol_type = other RNA
gtaatctaaagattccggag

SEQ ID NO: 6539 - RNA, 20 nt, synthetic construct
  misc_feature 1..20: note = source = /note="Description of Artificial Sequence: Synthetic oligonucleotide"
  source 1..20: mol_type = other RNA
ggtaatctaaagattccgga

SEQ ID NO: 6540 - RNA, 20 nt, synthetic construct
  misc_feature 1..20: note = source = /note="Description of Artificial Sequence: Synthetic oligonucleotide"
  source 1..20: mol_type = other RNA
tggtaatctaaagattccgg

SEQ ID NO: 6541 - RNA, 20 nt, synthetic construct
  misc_feature 1..20: note = source = /note="Description of Artificial Sequence: Synthetic oligonucleotide"
  source 1..20: mol_type = other RNA
agttggtaatctaaagattc

SEQ ID NO: 6542 - RNA, 20 nt, synthetic construct
  misc_feature 1..20: note = source = /note="Description of Artificial Sequence: Synthetic oligonucleotide"
  source 1..20: mol_type = other RNA
aaaacctggaagacagaagt

SEQ ID NO: 6543 - RNA, 20 nt, synthetic construct
  misc_feature 1..20: note = source = /note="Description of Artificial Sequence: Synthetic oligonucleotide"
  source 1..20: mol_type = other RNA
tttccaaggacataaaaacc

SEQ ID NO: 6544 - RNA, 20 nt, synthetic construct
  misc_feature 1..20: note = source = /note="Description of Artificial Sequence: Synthetic oligonucleotide"
  source 1..20: mol_type = other RNA
aaaatatgcataaatttcca

SEQ ID NO: 6545 - RNA, 20 nt, synthetic construct
  misc_feature 1..20: note = source = /note="Description of Artificial Sequence: Synthetic oligonucleotide"
  source 1..20: mol_type = other RNA
attaggaagaagatgaggat

SEQ ID NO: 6546 - RNA, 20 nt, synthetic construct
  misc_feature 1..20: note = source = /note="Description of Artificial Sequence: Synthetic oligonucleotide"
  source 1..20: mol_type = other RNA
gattaggaagaagatgagga

SEQ ID NO: 6547 - RNA, 20 nt, synthetic construct
  misc_feature 1..20: note = source = /note="Description of Artificial Sequence: Synthetic oligonucleotide"
  source 1..20: mol_type = other RNA
caaggattaggaagaagatg

SEQ ID NO: 6548 - RNA, 20 nt, synthetic construct
  misc_feature 1..20: note = source = /note="Description of Artificial Sequence: Synthetic oligonucleotide"
  source 1..20: mol_type = other RNA
ttcacaatatgtcaaggatt

SEQ ID NO: 6549 - RNA, 20 nt, synthetic construct
  misc_feature 1..20: note = source = /note="Description of Artificial Sequence: Synthetic oligonucleotide"
  source 1..20: mol_type = other RNA
tctgtgttcacaatatgtca

SEQ ID NO: 6550 - RNA, 20 nt, synthetic construct
  misc_feature 1..20: note = source = /note="Description of Artificial Sequence: Synthetic oligonucleotide"
  source 1..20: mol_type = other RNA
ttaagtatatttgtaactca

SEQ ID NO: 6551 - RNA, 20 nt, synthetic construct
  misc_feature 1..20: note = source = /note="Description of Artificial Sequence: Synthetic oligonucleotide"
  source 1..20: mol_type = other RNA
tttaagtatatttgtaactc

SEQ ID NO: 6552 - RNA, 20 nt, synthetic construct
  misc_feature 1..20: note = source = /note="Description of Artificial Sequence: Synthetic oligonucleotide"
  source 1..20: mol_type = other RNA
gagtccgaaaagtttccact

SEQ ID NO: 6553 - RNA, 20 nt, synthetic construct
  misc_feature 1..20: note = source = /note="Description of Artificial Sequence: Synthetic oligonucleotide"
  source 1..20: mol_type = other RNA
cgagtccgaaaagtttccac

SEQ ID NO: 6554 - RNA, 20 nt, synthetic construct
  misc_feature 1..20: note = source = /note="Description of Artificial Sequence: Synthetic oligonucleotide"
  source 1..20: mol_type = other RNA
gtctccgagtccgaaaagtt

SEQ ID NO: 6555 - RNA, 20 nt, synthetic construct
  misc_feature 1..20: note = source = /note="Description of Artificial Sequence: Synthetic oligonucleotide"
  source 1..20: mol_type = other RNA
tagagtgtagagtctccgag

SEQ ID NO: 6556 - RNA, 20 nt, synthetic construct
  misc_feature 1..20: note = source = /note="Description of Artificial Sequence: Synthetic oligonucleotide"
  source 1..20: mol_type = other RNA
cgtcagtagagtgtagagtc

SEQ ID NO: 6557 - RNA, 20 nt, synthetic construct
  misc_feature 1..20: note = source = /note="Description of Artificial Sequence: Synthetic oligonucleotide"
  source 1..20: mol_type = other RNA
ccttcgctggatcctaaatc

SEQ ID NO: 6558 - RNA, 20 nt, synthetic construct
  misc_feature 1..20: note = source = /note="Description of Artificial Sequence: Synthetic oligonucleotide"
  source 1..20: mol_type = other RNA
gttcatcacccttcgctgga

SEQ ID NO: 6559 - RNA, 20 nt, synthetic construct
  misc_feature 1..20: note = source = /note="Description of Artificial Sequence: Synthetic oligonucleotide"
  source 1..20: mol_type = other RNA
ttagggtagtatgttcatca

SEQ ID NO: 6560 - RNA, 20 nt, synthetic construct
  misc_feature 1..20: note = source = /note="Description of Artificial Sequence: Synthetic oligonucleotide"
  source 1..20: mol_type = other RNA
tttagggtagtatgttcatc

SEQ ID NO: 6561 - RNA, 20 nt, synthetic construct
  misc_feature 1..20: note = source = /note="Description of Artificial Sequence: Synthetic oligonucleotide"
  source 1..20: mol_type = other RNA
tgcgaattacagatttttta

SEQ ID NO: 6562 - RNA, 20 nt, synthetic construct
  misc_feature 1..20: note = source = /note="Description of Artificial Sequence: Synthetic oligonucleotide"
  source 1..20: mol_type = other RNA
ttgcgaattacagatttttt

SEQ ID NO: 6563 - RNA, 20 nt, synthetic construct
  misc_feature 1..20: note = source = /note="Description of Artificial Sequence: Synthetic oligonucleotide"
  source 1..20: mol_type = other RNA
ccaaaaaatgactgccttta

SEQ ID NO: 6564 - RNA, 20 nt, synthetic construct
  misc_feature 1..20: note = source = /note="Description of Artificial Sequence: Synthetic oligonucleotide"
  source 1..20: mol_type = other RNA
tgcaaaatgagggctcactg

SEQ ID NO: 6565 - RNA, 20 nt, synthetic construct
  misc_feature 1..20: note = source = /note="Description of Artificial Sequence: Synthetic oligonucleotide"
  source 1..20: mol_type = other RNA
aggcatatgttgcaaaatga

SEQ ID NO: 6566 - RNA, 20 nt, synthetic construct
  misc_feature 1..20: note = source = /note="Description of Artificial Sequence: Synthetic oligonucleotide"
  source 1..20: mol_type = other RNA
taggcatatgttgcaaaatg

SEQ ID NO: 6567 - RNA, 20 nt, synthetic construct
  misc_feature 1..20: note = source = /note="Description of Artificial Sequence: Synthetic oligonucleotide"
  source 1..20: mol_type = other RNA
gcaagccagatatgaaaagt

SEQ ID NO: 6568 - RNA, 20 nt, synthetic construct
  misc_feature 1..20: note = source = /note="Description of Artificial Sequence: Synthetic oligonucleotide"
  source 1..20: mol_type = other RNA
attaaattataaataataaa

SEQ ID NO: 6569 - RNA, 20 nt, synthetic construct
  misc_feature 1..20: note = source = /note="Description of Artificial Sequence: Synthetic oligonucleotide"
  source 1..20: mol_type = other RNA
ttacaaaactatggaaagag

SEQ ID NO: 6570 - RNA, 20 nt, synthetic construct
  misc_feature 1..20: note = source = /note="Description of Artificial Sequence: Synthetic oligonucleotide"
  source 1..20: mol_type = other RNA
gcaattctattacaaaacta

SEQ ID NO: 6571 - RNA, 20 nt, synthetic construct
  misc_feature 1..20: note = source = /note="Description of Artificial Sequence: Synthetic oligonucleotide"
  source 1..20: mol_type = other RNA
ctcatactctgccctgttcc

SEQ ID NO: 6572 - RNA, 20 nt, synthetic construct
  misc_feature 1..20: note = source = /note="Description of Artificial Sequence: Synthetic oligonucleotide"
  source 1..20: mol_type = other RNA
acatttaaaaatatttggtc

SEQ ID NO: 6573 - RNA, 20 nt, synthetic construct
  misc_feature 1..20: note = source = /note="Description of Artificial Sequence: Synthetic oligonucleotide"
  source 1..20: mol_type = other RNA
ttaagacatttaaaaatatt

SEQ ID NO: 6574 - RNA, 20 nt, synthetic construct
  misc_feature 1..20: note = source = /note="Description of Artificial Sequence: Synthetic oligonucleotide"
  source 1..20: mol_type = other RNA
gtacacggttcgtgtcacaa

SEQ ID NO: 6575 - RNA, 20 nt, synthetic construct
  misc_feature 1..20: note = source = /note="Description of Artificial Sequence: Synthetic oligonucleotide"
  source 1..20: mol_type = other RNA
cttacgtaaaaatgtcttaa

SEQ ID NO: 6576 - RNA, 20 nt, synthetic construct
  misc_feature 1..20: note = source = /note="Description of Artificial Sequence: Synthetic oligonucleotide"
  source 1..20: mol_type = other RNA
cttagtaaagcataatcata

SEQ ID NO: 6577 - RNA, 20 nt, synthetic construct
  misc_feature 1..20: note = source = /note="Description of Artificial Sequence: Synthetic oligonucleotide"
  source 1..20: mol_type = other RNA
ccacatggtcaatgtaggaa

SEQ ID NO: 6578 - RNA, 20 nt, synthetic construct
  misc_feature 1..20: note = source = /note="Description of Artificial Sequence: Synthetic oligonucleotide"
  source 1..20: mol_type = other RNA
tgagtccacatggtcaatgt

SEQ ID NO: 6579 - RNA, 20 nt, synthetic construct
  misc_feature 1..20: note = source = /note="Description of Artificial Sequence: Synthetic oligonucleotide"
  source 1..20: mol_type = other RNA
aggccaaatatgagtccaca

SEQ ID NO: 6580 - RNA, 20 nt, synthetic construct
  misc_feature 1..20: note = source = /note="Description of Artificial Sequence: Synthetic oligonucleotide"
  source 1..20: mol_type = other RNA
ttattctaatgtaattatat

SEQ ID NO: 6581 - RNA, 20 nt, synthetic construct
  misc_feature 1..20: note = source = /note="Description of Artificial Sequence: Synthetic oligonucleotide"
  source 1..20: mol_type = other RNA
ctacttccttttccaacttt

SEQ ID NO: 6582 - RNA, 20 nt, synthetic construct
  misc_feature 1..20: note = source = /note="Description of Artificial Sequence: Synthetic oligonucleotide"
  source 1..20: mol_type = other RNA
ttctgtgtaatgtaatgtat

SEQ ID NO: 6583 - RNA, 20 nt, synthetic construct
  misc_feature 1..20: note = source = /note="Description of Artificial Sequence: Synthetic oligonucleotide"
  source 1..20: mol_type = other RNA
aatgtattgtatacaaagcc

SEQ ID NO: 6584 - RNA, 20 nt, synthetic construct
  misc_feature 1..20: note = source = /note="Description of Artificial Sequence: Synthetic oligonucleotide"
  source 1..20: mol_type = other RNA
ttctgtgtaatgtaatgtat

SEQ ID NO: 6585 - RNA, 20 nt, synthetic construct
  misc_feature 1..20: note = source = /note="Description of Artificial Sequence: Synthetic oligonucleotide"
  source 1..20: mol_type = other RNA
aatgtattgtatacaaagcc

SEQ ID NO: 6586 - RNA, 20 nt, synthetic construct
  misc_feature 1..20: note = source = /note="Description of Artificial Sequence: Synthetic oligonucleotide"
  source 1..20: mol_type = other RNA
ttctgtgtaatgtaatgtat

SEQ ID NO: 6587 - RNA, 20 nt, synthetic construct
  misc_feature 1..20: note = source = /note="Description of Artificial Sequence: Synthetic oligonucleotide"
  source 1..20: mol_type = other RNA
tagatgtgtttcccaaagcc

SEQ ID NO: 6588 - RNA, 20 nt, synthetic construct
  misc_feature 1..20: note = source = /note="Description of Artificial Sequence: Synthetic oligonucleotide"
  source 1..20: mol_type = other RNA
ttgtgctatgttaagagttt

SEQ ID NO: 6589 - RNA, 20 nt, synthetic construct
  misc_feature 1..20: note = source = /note="Description of Artificial Sequence: Synthetic oligonucleotide"
  source 1..20: mol_type = other RNA
tcttggtattacctaccgta

SEQ ID NO: 6590 - RNA, 20 nt, synthetic construct
  misc_feature 1..20: note = source = /note="Description of Artificial Sequence: Synthetic oligonucleotide"
  source 1..20: mol_type = other RNA
ataacggccctgatttgtct

SEQ ID NO: 6591 - RNA, 20 nt, synthetic construct
  misc_feature 1..20: note = source = /note="Description of Artificial Sequence: Synthetic oligonucleotide"
  source 1..20: mol_type = other RNA
ttcctcaaggttgttaataa

SEQ ID NO: 6592 - RNA, 20 nt, synthetic construct
  misc_feature 1..20: note = source = /note="Description of Artificial Sequence: Synthetic oligonucleotide"
  source 1..20: mol_type = other RNA
tttcccaagacatttcctca

SEQ ID NO: 6593 - RNA, 20 nt, synthetic construct
  misc_feature 1..20: note = source = /note="Description of Artificial Sequence: Synthetic oligonucleotide"
  source 1..20: mol_type = other RNA
agtttgggatgacttcacag

SEQ ID NO: 6594 - RNA, 20 nt, synthetic construct
  misc_feature 1..20: note = source = /note="Description of Artificial Sequence: Synthetic oligonucleotide"
  source 1..20: mol_type = other RNA
aaatttgcctcgaagagttt

SEQ ID NO: 6595 - RNA, 20 nt, synthetic construct
  misc_feature 1..20: note = source = /note="Description of Artificial Sequence: Synthetic oligonucleotide"
  source 1..20: mol_type = other RNA
taaatttgcctcgaagagtt

SEQ ID NO: 6596 - RNA, 20 nt, synthetic construct
  misc_feature 1..20: note = source = /note="Description of Artificial Sequence: Synthetic oligonucleotide"
  source 1..20: mol_type = other RNA
cattaaaaaacaggggtggg

SEQ ID NO: 6597 - RNA, 20 nt, synthetic construct
  misc_feature 1..20: note = source = /note="Description of Artificial Sequence: Synthetic oligonucleotide"
  source 1..20: mol_type = other RNA
aaacattaaaaaacaggggt

SEQ ID NO: 6598 - RNA, 20 nt, synthetic construct
  misc_feature 1..20: note = source = /note="Description of Artificial Sequence: Synthetic oligonucleotide"
  source 1..20: mol_type = other RNA
gaaacattaaaaaacagggg

SEQ ID NO: 6599 - RNA, 20 nt, synthetic construct
  misc_feature 1..20: note = source = /note="Description of Artificial Sequence: Synthetic oligonucleotide"
  source 1..20: mol_type = other RNA
ttagaaacattaaaaaacag

SEQ ID NO: 6600 - RNA, 20 nt, synthetic construct
  misc_feature 1..20: note = source = /note="Description of Artificial Sequence: Synthetic oligonucleotide"
  source 1..20: mol_type = other RNA
tttagaaacattaaaaaaca

SEQ ID NO: 6601 - RNA, 20 nt, synthetic construct
  misc_feature 1..20: note = source = /note="Description of Artificial Sequence: Synthetic oligonucleotide"
  source 1..20: mol_type = other RNA
ctttagaaacattaaaaaac

SEQ ID NO: 6602 - RNA, 20 nt, synthetic construct
  misc_feature 1..20: note = source = /note="Description of Artificial Sequence: Synthetic oligonucleotide"
  source 1..20: mol_type = other RNA
gtccgtactcggtgacgtga

SEQ ID NO: 6603 - RNA, 20 nt, synthetic construct
  misc_feature 1..20: note = source = /note="Description of Artificial Sequence: Synthetic oligonucleotide"
  source 1..20: mol_type = other RNA
agggtttcacgacgctaatg

SEQ ID NO: 6604 - RNA, 20 nt, synthetic construct
  misc_feature 1..20: note = source = /note="Description of Artificial Sequence: Synthetic oligonucleotide"
  source 1..20: mol_type = other RNA
gagtccattagatgggcgga

SEQ ID NO: 6605 - RNA, 20 nt, synthetic construct
  misc_feature 1..20: note = source = /note="Description of Artificial Sequence: Synthetic oligonucleotide"
  source 1..20: mol_type = other RNA
ccagagtttgaggactggag

SEQ ID NO: 6606 - RNA, 20 nt, synthetic construct
  misc_feature 1..20: note = source = /note="Description of Artificial Sequence: Synthetic oligonucleotide"
  source 1..20: mol_type = other RNA
aaagcggtataaccgatccg

SEQ ID NO: 6607 - RNA, 20 nt, synthetic construct
  misc_feature 1..20: note = source = /note="Description of Artificial Sequence: Synthetic oligonucleotide"
  source 1..20: mol_type = other RNA
tcccaaagcggtataaccga

SEQ ID NO: 6608 - RNA, 20 nt, synthetic construct
  misc_feature 1..20: note = source = /note="Description of Artificial Sequence: Synthetic oligonucleotide"
  source 1..20: mol_type = other RNA
atctctcccaaagcggtata

SEQ ID NO: 6609 - RNA, 20 nt, synthetic construct
  misc_feature 1..20: note = source = /note="Description of Artificial Sequence: Synthetic oligonucleotide"
  source 1..20: mol_type = other RNA
aaaacataaaaatcatctct

SEQ ID NO: 6610 - RNA, 20 nt, synthetic construct
  misc_feature 1..20: note = source = /note="Description of Artificial Sequence: Synthetic oligonucleotide"
  source 1..20: mol_type = other RNA
aaaaacataaaaatcatctc

SEQ ID NO: 6611 - RNA, 20 nt, synthetic construct
  misc_feature 1..20: note = source = /note="Description of Artificial Sequence: Synthetic oligonucleotide"
  source 1..20: mol_type = other RNA
gtccgtgaacggtgatgcgg

SEQ ID NO: 6612 - RNA, 20 nt, synthetic construct
  misc_feature 1..20: note = source = /note="Description of Artificial Sequence: Synthetic oligonucleotide"
  source 1..20: mol_type = other RNA
aggactcatcgaccctaatg

SEQ ID NO: 6613 - RNA, 20 nt, synthetic construct
  misc_feature 1..20: note = source = /note="Description of Artificial Sequence: Synthetic oligonucleotide"
  source 1..20: mol_type = other RNA
ggagtcggaggactcatcga

SEQ ID NO: 6614 - RNA, 20 nt, synthetic construct
  misc_feature 1..20: note = source = /note="Description of Artificial Sequence: Synthetic oligonucleotide"
  source 1..20: mol_type = other RNA
cggagtcggaggactcatcg

SEQ ID NO: 6615 - RNA, 20 nt, synthetic construct
  misc_feature 1..20: note = source = /note="Description of Artificial Sequence: Synthetic oligonucleotide"
  source 1..20: mol_type = other RNA
agtgacgttggagcggaggg

SEQ ID NO: 6616 - RNA, 20 nt, synthetic construct
  misc_feature 1..20: note = source = /note="Description of Artificial Sequence: Synthetic oligonucleotide"
  source 1..20: mol_type = other RNA
gagtgacgttggagcggagg

SEQ ID NO: 6617 - RNA, 20 nt, synthetic construct
  misc_feature 1..20: note = source = /note="Description of Artificial Sequence: Synthetic oligonucleotide"
  source 1..20: mol_type = other RNA
agagtgaggcagcgggtccg

SEQ ID NO: 6618 - RNA, 20 nt, synthetic construct
  misc_feature 1..20: note = source = /note="Description of Artificial Sequence: Synthetic oligonucleotide"
  source 1..20: mol_type = other RNA
cctcagagtgaggcagcggg

SEQ ID NO: 6619 - RNA, 20 nt, synthetic construct
  misc_feature 1..20: note = source = /note="Description of Artificial Sequence: Synthetic oligonucleotide"
  source 1..20: mol_type = other RNA
aaacaaaaacaaaaaactct

SEQ ID NO: 6620 - RNA, 20 nt, synthetic construct
  misc_feature 1..20: note = source = /note="Description of Artificial Sequence: Synthetic oligonucleotide"
  source 1..20: mol_type = other RNA
caatataaaaaaaaaaaaaa

SEQ ID NO: 6621 - RNA, 20 nt, synthetic construct
  misc_feature 1..20: note = source = /note="Description of Artificial Sequence: Synthetic oligonucleotide"
  source 1..20: mol_type = other RNA
attcaagattcttgtccttg

SEQ ID NO: 6622 - RNA, 20 nt, synthetic construct
  misc_feature 1..20: note = source = /note="Description of Artificial Sequence: Synthetic oligonucleotide"
  source 1..20: mol_type = other RNA
taagtacctcatatgcacta

SEQ ID NO: 6623 - RNA, 20 nt, synthetic construct
  misc_feature 1..20: note = source = /note="Description of Artificial Sequence: Synthetic oligonucleotide"
  source 1..20: mol_type = other RNA
acatgatgtctaatattttt

SEQ ID NO: 6624 - RNA, 20 nt, synthetic construct
  misc_feature 1..20: note = source = /note="Description of Artificial Sequence: Synthetic oligonucleotide"
  source 1..20: mol_type = other RNA
atactttttctatcaactgt

SEQ ID NO: 6625 - RNA, 20 nt, synthetic construct
  misc_feature 1..20: note = source = /note="Description of Artificial Sequence: Synthetic oligonucleotide"
  source 1..20: mol_type = other RNA
tttgaaacagttttctccat

SEQ ID NO: 6626 - RNA, 20 nt, synthetic construct
  misc_feature 1..20: note = source = /note="Description of Artificial Sequence: Synthetic oligonucleotide"
  source 1..20: mol_type = other RNA
atatttcgtttctttttctt

SEQ ID NO: 6627 - RNA, 20 nt, synthetic construct
  misc_feature 1..20: note = source = /note="Description of Artificial Sequence: Synthetic oligonucleotide"
  source 1..20: mol_type = other RNA
aatatttcgtttctttttct

SEQ ID NO: 6628 - RNA, 20 nt, synthetic construct
  misc_feature 1..20: note = source = /note="Description of Artificial Sequence: Synthetic oligonucleotide"
  source 1..20: mol_type = other RNA
tgacgatttcagtagagttc

SEQ ID NO: 6629 - RNA, 20 nt, synthetic construct
  misc_feature 1..20: note = source = /note="Description of Artificial Sequence: Synthetic oligonucleotide"
  source 1..20: mol_type = other RNA
gatctcacgtaccacaaggt

SEQ ID NO: 6630 - RNA, 20 nt, synthetic construct
  misc_feature 1..20: note = source = /note="Description of Artificial Sequence: Synthetic oligonucleotide"
  source 1..20: mol_type = other RNA
ggatctcacgtaccacaagg

SEQ ID NO: 6631 - RNA, 20 nt, synthetic construct
  misc_feature 1..20: note = source = /note="Description of Artificial Sequence: Synthetic oligonucleotide"
  source 1..20: mol_type = other RNA
taatcttttggatctcacgt

SEQ ID NO: 6632 - RNA, 20 nt, synthetic construct
  misc_feature 1..20: note = source = /note="Description of Artificial Sequence: Synthetic oligonucleotide"
  source 1..20: mol_type = other RNA
gtgattgaatcacatgtgtc

SEQ ID NO: 6633 - RNA, 20 nt, synthetic construct
  misc_feature 1..20: note = source = /note="Description of Artificial Sequence: Synthetic oligonucleotide"
  source 1..20: mol_type = other RNA
agatcacttatcgttttgat

SEQ ID NO: 6634 - RNA, 20 nt, synthetic construct
  misc_feature 1..20: note = source = /note="Description of Artificial Sequence: Synthetic oligonucleotide"
  source 1..20: mol_type = other RNA
tttagattctcatccaagga

SEQ ID NO: 6635 - RNA, 20 nt, synthetic construct
  misc_feature 1..20: note = source = /note="Description of Artificial Sequence: Synthetic oligonucleotide"
  source 1..20: mol_type = other RNA
ccgaattatttagattctca

SEQ ID NO: 6636 - RNA, 20 nt, synthetic construct
  misc_feature 1..20: note = source = /note="Description of Artificial Sequence: Synthetic oligonucleotide"
  source 1..20: mol_type = other RNA
ttattgttttatatatatca

SEQ ID NO: 6637 - RNA, 20 nt, synthetic construct
  misc_feature 1..20: note = source = /note="Description of Artificial Sequence: Synthetic oligonucleotide"
  source 1..20: mol_type = other RNA
ttcgtttaaattcgtttctt

SEQ ID NO: 6638 - RNA, 20 nt, synthetic construct
  misc_feature 1..20: note = source = /note="Description of Artificial Sequence: Synthetic oligonucleotide"
  source 1..20: mol_type = other RNA
cataaggtttagtgattaaa

SEQ ID NO: 6639 - RNA, 20 nt, synthetic construct
  misc_feature 1..20: note = source = /note="Description of Artificial Sequence: Synthetic oligonucleotide"
  source 1..20: mol_type = other RNA
ttcgtggagagttttacgta

SEQ ID NO: 6640 - RNA, 20 nt, synthetic construct
  misc_feature 1..20: note = source = /note="Description of Artificial Sequence: Synthetic oligonucleotide"
  source 1..20: mol_type = other RNA
ctttcgtttcgaaactttat

SEQ ID NO: 6641 - RNA, 20 nt, synthetic construct
  misc_feature 1..20: note = source = /note="Description of Artificial Sequence: Synthetic oligonucleotide"
  source 1..20: mol_type = other RNA
aaataataaagctagtcaag

SEQ ID NO: 6642 - RNA, 20 nt, synthetic construct
  misc_feature 1..20: note = source = /note="Description of Artificial Sequence: Synthetic oligonucleotide"
  source 1..20: mol_type = other RNA
aagttaaggaaaatattgtt

SEQ ID NO: 6643 - RNA, 20 nt, synthetic construct
  misc_feature 1..20: note = source = /note="Description of Artificial Sequence: Synthetic oligonucleotide"
  source 1..20: mol_type = other RNA
aggctaaaattaagaagtta

SEQ ID NO: 6644 - RNA, 20 nt, synthetic construct
  misc_feature 1..20: note = source = /note="Description of Artificial Sequence: Synthetic oligonucleotide"
  source 1..20: mol_type = other RNA
aaatgattaacttggaaaac

SEQ ID NO: 6645 - RNA, 20 nt, synthetic construct
  misc_feature 1..20: note = source = /note="Description of Artificial Sequence: Synthetic oligonucleotide"
  source 1..20: mol_type = other RNA
caacagataaatgattaact

SEQ ID NO: 6646 - RNA, 20 nt, synthetic construct
  misc_feature 1..20: note = source = /note="Description of Artificial Sequence: Synthetic oligonucleotide"
  source 1..20: mol_type = other RNA
ctgacaaagaaaattttctt

SEQ ID NO: 6647 - RNA, 20 nt, synthetic construct
  misc_feature 1..20: note = source = /note="Description of Artificial Sequence: Synthetic oligonucleotide"
  source 1..20: mol_type = other RNA
tagtacctattgggttgggg

SEQ ID NO: 6648 - RNA, 20 nt, synthetic construct
  misc_feature 1..20: note = source = /note="Description of Artificial Sequence: Synthetic oligonucleotide"
  source 1..20: mol_type = other RNA
atagtacctattgggttggg

SEQ ID NO: 6649 - RNA, 20 nt, synthetic construct
  misc_feature 1..20: note = source = /note="Description of Artificial Sequence: Synthetic oligonucleotide"
  source 1..20: mol_type = other RNA
aatagtacctattgggttgg

SEQ ID NO: 6650 - RNA, 20 nt, synthetic construct
  misc_feature 1..20: note = source = /note="Description of Artificial Sequence: Synthetic oligonucleotide"
  source 1..20: mol_type = other RNA
gaatagtacctattgggttg

SEQ ID NO: 6651 - RNA, 20 nt, synthetic construct
  misc_feature 1..20: note = source = /note="Description of Artificial Sequence: Synthetic oligonucleotide"
  source 1..20: mol_type = other RNA
agaatagtacctattgggtt

SEQ ID NO: 6652 - RNA, 20 nt, synthetic construct
  misc_feature 1..20: note = source = /note="Description of Artificial Sequence: Synthetic oligonucleotide"
  source 1..20: mol_type = other RNA
cagaatagtacctattgggt

SEQ ID NO: 6653 - RNA, 20 nt, synthetic construct
  misc_feature 1..20: note = source = /note="Description of Artificial Sequence: Synthetic oligonucleotide"
  source 1..20: mol_type = other RNA
aaatcagaatagtacctatt

SEQ ID NO: 6654 - RNA, 20 nt, synthetic construct
  misc_feature 1..20: note = source = /note="Description of Artificial Sequence: Synthetic oligonucleotide"
  source 1..20: mol_type = other RNA
caaatcagaatagtacctat

SEQ ID NO: 6655 - RNA, 20 nt, synthetic construct
  misc_feature 1..20: note = source = /note="Description of Artificial Sequence: Synthetic oligonucleotide"
  source 1..20: mol_type = other RNA
tccttcaagaatgtgtgaat

SEQ ID NO: 6656 - RNA, 20 nt, synthetic construct
  misc_feature 1..20: note = source = /note="Description of Artificial Sequence: Synthetic oligonucleotide"
  source 1..20: mol_type = other RNA
aaattatattataattttgt

SEQ ID NO: 6657 - RNA, 20 nt, synthetic construct
  misc_feature 1..20: note = source = /note="Description of Artificial Sequence: Synthetic oligonucleotide"
  source 1..20: mol_type = other RNA
aaaattatattataattttg

SEQ ID NO: 6658 - RNA, 20 nt, synthetic construct
  misc_feature 1..20: note = source = /note="Description of Artificial Sequence: Synthetic oligonucleotide"
  source 1..20: mol_type = other RNA
gacggtaacgtgaggtcgga

SEQ ID NO: 6659 - RNA, 20 nt, synthetic construct
  misc_feature 1..20: note = source = /note="Description of Artificial Sequence: Synthetic oligonucleotide"
  source 1..20: mol_type = other RNA
gagaactttggccctccgcc

SEQ ID NO: 6660 - RNA, 20 nt, synthetic construct
  misc_feature 1..20: note = source = /note="Description of Artificial Sequence: Synthetic oligonucleotide"
  source 1..20: mol_type = other RNA
ttagagaactttggccctcc

SEQ ID NO: 6661 - RNA, 20 nt, synthetic construct
  misc_feature 1..20: note = source = /note="Description of Artificial Sequence: Synthetic oligonucleotide"
  source 1..20: mol_type = other RNA
ctcttagagaactttggccc

SEQ ID NO: 6662 - RNA, 20 nt, synthetic construct
  misc_feature 1..20: note = source = /note="Description of Artificial Sequence: Synthetic oligonucleotide"
  source 1..20: mol_type = other RNA
gtcctcttagagaactttgg

SEQ ID NO: 6663 - RNA, 20 nt, synthetic construct
  misc_feature 1..20: note = source = /note="Description of Artificial Sequence: Synthetic oligonucleotide"
  source 1..20: mol_type = other RNA
cgtcctcttagagaactttg

SEQ ID NO: 6664 - RNA, 20 nt, synthetic construct
  misc_feature 1..20: note = source = /note="Description of Artificial Sequence: Synthetic oligonucleotide"
  source 1..20: mol_type = other RNA
cgatgagccctccgactccg

SEQ ID NO: 6665 - RNA, 20 nt, synthetic construct
  misc_feature 1..20: note = source = /note="Description of Artificial Sequence: Synthetic oligonucleotide"
  source 1..20: mol_type = other RNA
gggtcgatgagccctccgac

SEQ ID NO: 6666 - RNA, 20 nt, synthetic construct
  misc_feature 1..20: note = source = /note="Description of Artificial Sequence: Synthetic oligonucleotide"
  source 1..20: mol_type = other RNA
atattagggtcgatgagccc

SEQ ID NO: 6667 - RNA, 20 nt, synthetic construct
  misc_feature 1..20: note = source = /note="Description of Artificial Sequence: Synthetic oligonucleotide"
  source 1..20: mol_type = other RNA
cggatattagggtcgatgag

SEQ ID NO: 6668 - RNA, 20 nt, synthetic construct
  misc_feature 1..20: note = source = /note="Description of Artificial Sequence: Synthetic oligonucleotide"
  source 1..20: mol_type = other RNA
acggatattagggtcgatga

SEQ ID NO: 6669 - RNA, 20 nt, synthetic construct
  misc_feature 1..20: note = source = /note="Description of Artificial Sequence: Synthetic oligonucleotide"
  source 1..20: mol_type = other RNA
ttttttaatcggtcctcacc

SEQ ID NO: 6670 - RNA, 20 nt, synthetic construct
  misc_feature 1..20: note = source = /note="Description of Artificial Sequence: Synthetic oligonucleotide"
  source 1..20: mol_type = other RNA
tctttttttaatcggtcctc

SEQ ID NO: 6671 - RNA, 20 nt, synthetic construct
  misc_feature 1..20: note = source = /note="Description of Artificial Sequence: Synthetic oligonucleotide"
  source 1..20: mol_type = other RNA
ttttatctttttttaatcgg

SEQ ID NO: 6672 - RNA, 20 nt, synthetic construct
  misc_feature 1..20: note = source = /note="Description of Artificial Sequence: Synthetic oligonucleotide"
  source 1..20: mol_type = other RNA
actctggccggactggttgt

SEQ ID NO: 6673 - RNA, 20 nt, synthetic construct
  misc_feature 1..20: note = source = /note="Description of Artificial Sequence: Synthetic oligonucleotide"
  source 1..20: mol_type = other RNA
actccaaccctcaaactctg

SEQ ID NO: 6674 - RNA, 20 nt, synthetic construct
  misc_feature 1..20: note = source = /note="Description of Artificial Sequence: Synthetic oligonucleotide"
  source 1..20: mol_type = other RNA
gtccacctagtggactccaa

SEQ ID NO: 6675 - RNA, 20 nt, synthetic construct
  misc_feature 1..20: note = source = /note="Description of Artificial Sequence: Synthetic oligonucleotide"
  source 1..20: mol_type = other RNA
cgtccacctagtggactcca

SEQ ID NO: 6676 - RNA, 20 nt, synthetic construct
  misc_feature 1..20: note = source = /note="Description of Artificial Sequence: Synthetic oligonucleotide"
  source 1..20: mol_type = other RNA
acttcgtccacctagtggac

SEQ ID NO: 6677 - RNA, 20 nt, synthetic construct
  misc_feature 1..20: note = source = /note="Description of Artificial Sequence: Synthetic oligonucleotide"
  source 1..20: mol_type = other RNA
gaaatcctccgacttcgtcc

SEQ ID NO: 6678 - RNA, 20 nt, synthetic construct
  misc_feature 1..20: note = source = /note="Description of Artificial Sequence: Synthetic oligonucleotide"
  source 1..20: mol_type = other RNA
cgtgaaatcctccgacttcg

SEQ ID NO: 6679 - RNA, 20 nt, synthetic construct
  misc_feature 1..20: note = source = /note="Description of Artificial Sequence: Synthetic oligonucleotide"
  source 1..20: mol_type = other RNA
acattaggatcgtgaaatcc

SEQ ID NO: 6680 - RNA, 20 nt, synthetic construct
  misc_feature 1..20: note = source = /note="Description of Artificial Sequence: Synthetic oligonucleotide"
  source 1..20: mol_type = other RNA
cggacattaggatcgtgaaa

SEQ ID NO: 6681 - RNA, 20 nt, synthetic construct
  misc_feature 1..20: note = source = /note="Description of Artificial Sequence: Synthetic oligonucleotide"
  source 1..20: mol_type = other RNA
atgttttcccgacccacacc

SEQ ID NO: 6682 - RNA, 20 nt, synthetic construct
  misc_feature 1..20: note = source = /note="Description of Artificial Sequence: Synthetic oligonucleotide"
  source 1..20: mol_type = other RNA
ataatgttttcccgacccac

SEQ ID NO: 6683 - RNA, 20 nt, synthetic construct
  misc_feature 1..20: note = source = /note="Description of Artificial Sequence: Synthetic oligonucleotide"
  source 1..20: mol_type = other RNA
ttaagataatgttttcccga

SEQ ID NO: 6684 - RNA, 20 nt, synthetic construct
  misc_feature 1..20: note = source = /note="Description of Artificial Sequence: Synthetic oligonucleotide"
  source 1..20: mol_type = other RNA
attaagataatgttttcccg

SEQ ID NO: 6685 - RNA, 20 nt, synthetic construct
  misc_feature 1..20: note = source = /note="Description of Artificial Sequence: Synthetic oligonucleotide"
  source 1..20: mol_type = other RNA
ctccattaagataatgtttt

SEQ ID NO: 6686 - RNA, 20 nt, synthetic construct
  misc_feature 1..20: note = source = /note="Description of Artificial Sequence: Synthetic oligonucleotide"
  source 1..20: mol_type = other RNA
aagggtgtgggttgtggggt

SEQ ID NO: 6687 - RNA, 20 nt, synthetic construct
  misc_feature 1..20: note = source = /note="Description of Artificial Sequence: Synthetic oligonucleotide"
  source 1..20: mol_type = other RNA
aaagggtgtgggttgtgggg

SEQ ID NO: 6688 - RNA, 20 nt, synthetic construct
  misc_feature 1..20: note = source = /note="Description of Artificial Sequence: Synthetic oligonucleotide"
  source 1..20: mol_type = other RNA
tacaaagggtgtgggttgtg

SEQ ID NO: 6689 - RNA, 20 nt, synthetic construct
  misc_feature 1..20: note = source = /note="Description of Artificial Sequence: Synthetic oligonucleotide"
  source 1..20: mol_type = other RNA
atacaaagggtgtgggttgt

SEQ ID NO: 6690 - RNA, 20 nt, synthetic construct
  misc_feature 1..20: note = source = /note="Description of Artificial Sequence: Synthetic oligonucleotide"
  source 1..20: mol_type = other RNA
aatacaaagggtgtgggttg

SEQ ID NO: 6691 - RNA, 20 nt, synthetic construct
  misc_feature 1..20: note = source = /note="Description of Artificial Sequence: Synthetic oligonucleotide"
  source 1..20: mol_type = other RNA
aagagaaatacaaagggtgt

SEQ ID NO: 6692 - RNA, 20 nt, synthetic construct
  misc_feature 1..20: note = source = /note="Description of Artificial Sequence: Synthetic oligonucleotide"
  source 1..20: mol_type = other RNA
aaagagaaatacaaagggtg

SEQ ID NO: 6693 - RNA, 20 nt, synthetic construct
  misc_feature 1..20: note = source = /note="Description of Artificial Sequence: Synthetic oligonucleotide"
  source 1..20: mol_type = other RNA
aagtaaaagagaaatacaaa

SEQ ID NO: 6694 - RNA, 20 nt, synthetic construct
  misc_feature 1..20: note = source = /note="Description of Artificial Sequence: Synthetic oligonucleotide"
  source 1..20: mol_type = other RNA
caagtaaaagagaaatacaa

SEQ ID NO: 6695 - RNA, 20 nt, synthetic construct
  misc_feature 1..20: note = source = /note="Description of Artificial Sequence: Synthetic oligonucleotide"
  source 1..20: mol_type = other RNA
aaactataaatctgaactag

SEQ ID NO: 6696 - RNA, 20 nt, synthetic construct
  misc_feature 1..20: note = source = /note="Description of Artificial Sequence: Synthetic oligonucleotide"
  source 1..20: mol_type = other RNA
gagctgttccccaaccagat

SEQ ID NO: 6697 - RNA, 20 nt, synthetic construct
  misc_feature 1..20: note = source = /note="Description of Artificial Sequence: Synthetic oligonucleotide"
  source 1..20: mol_type = other RNA
agagctgttccccaaccaga

SEQ ID NO: 6698 - RNA, 20 nt, synthetic construct
  misc_feature 1..20: note = source = /note="Description of Artificial Sequence: Synthetic oligonucleotide"
  source 1..20: mol_type = other RNA
ggaaagggagaggtcccagt

SEQ ID NO: 6699 - RNA, 20 nt, synthetic construct
  misc_feature 1..20: note = source = /note="Description of Artificial Sequence: Synthetic oligonucleotide"
  source 1..20: mol_type = other RNA
aggaaagggagaggtcccag

SEQ ID NO: 6700 - RNA, 20 nt, synthetic construct
  misc_feature 1..20: note = source = /note="Description of Artificial Sequence: Synthetic oligonucleotide"
  source 1..20: mol_type = other RNA
tcactcatgaggaaagggag

SEQ ID NO: 6701 - RNA, 20 nt, synthetic construct
  misc_feature 1..20: note = source = /note="Description of Artificial Sequence: Synthetic oligonucleotide"
  source 1..20: mol_type = other RNA
tggcgtcactcatgaggaaa

SEQ ID NO: 6702 - RNA, 20 nt, synthetic construct
  misc_feature 1..20: note = source = /note="Description of Artificial Sequence: Synthetic oligonucleotide"
  source 1..20: mol_type = other RNA
ctggcgtcactcatgaggaa

SEQ ID NO: 6703 - RNA, 20 nt, synthetic construct
  misc_feature 1..20: note = source = /note="Description of Artificial Sequence: Synthetic oligonucleotide"
  source 1..20: mol_type = other RNA
ggaccctggcgtcactcatg

SEQ ID NO: 6704 - RNA, 20 nt, synthetic construct
  misc_feature 1..20: note = source = /note="Description of Artificial Sequence: Synthetic oligonucleotide"
  source 1..20: mol_type = other RNA
gcttatgggcagcaggaccc

SEQ ID NO: 6705 - RNA, 20 nt, synthetic construct
  misc_feature 1..20: note = source = /note="Description of Artificial Sequence: Synthetic oligonucleotide"
  source 1..20: mol_type = other RNA
acagaatgcttatgggcagc

SEQ ID NO: 6706 - RNA, 20 nt, synthetic construct
  misc_feature 1..20: note = source = /note="Description of Artificial Sequence: Synthetic oligonucleotide"
  source 1..20: mol_type = other RNA
tcagcaaacagaatgcttat

SEQ ID NO: 6707 - RNA, 20 nt, synthetic construct
  misc_feature 1..20: note = source = /note="Description of Artificial Sequence: Synthetic oligonucleotide"
  source 1..20: mol_type = other RNA
ctcagcaaacagaatgctta

SEQ ID NO: 6708 - RNA, 20 nt, synthetic construct
  misc_feature 1..20: note = source = /note="Description of Artificial Sequence: Synthetic oligonucleotide"
  source 1..20: mol_type = other RNA
aaggcagcgaagctggggaa

SEQ ID NO: 6709 - RNA, 20 nt, synthetic construct
  misc_feature 1..20: note = source = /note="Description of Artificial Sequence: Synthetic oligonucleotide"
  source 1..20: mol_type = other RNA
agccaaaggcagcgaagctg

SEQ ID NO: 6710 - RNA, 20 nt, synthetic construct
  misc_feature 1..20: note = source = /note="Description of Artificial Sequence: Synthetic oligonucleotide"
  source 1..20: mol_type = other RNA
cagccaaaggcagcgaagct

SEQ ID NO: 6711 - RNA, 20 nt, synthetic construct
  misc_feature 1..20: note = source = /note="Description of Artificial Sequence: Synthetic oligonucleotide"
  source 1..20: mol_type = other RNA
gcagccaaaggcagcgaagc

SEQ ID NO: 6712 - RNA, 20 nt, synthetic construct
  misc_feature 1..20: note = source = /note="Description of Artificial Sequence: Synthetic oligonucleotide"
  source 1..20: mol_type = other RNA
cttaatcacaaagcagccaa

SEQ ID NO: 6713 - RNA, 20 nt, synthetic construct
  misc_feature 1..20: note = source = /note="Description of Artificial Sequence: Synthetic oligonucleotide"
  source 1..20: mol_type = other RNA
aaggaggctttaggaaacat

SEQ ID NO: 6714 - RNA, 20 nt, synthetic construct
  misc_feature 1..20: note = source = /note="Description of Artificial Sequence: Synthetic oligonucleotide"
  source 1..20: mol_type = other RNA
gaaggaggctttaggaaaca

SEQ ID NO: 6715 - RNA, 20 nt, synthetic construct
  misc_feature 1..20: note = source = /note="Description of Artificial Sequence: Synthetic oligonucleotide"
  source 1..20: mol_type = other RNA
ctaaaggcgaaggaggcttt

SEQ ID NO: 6716 - RNA, 20 nt, synthetic construct
  misc_feature 1..20: note = source = /note="Description of Artificial Sequence: Synthetic oligonucleotide"
  source 1..20: mol_type = other RNA
tcaaggactaaaggcgaagg

SEQ ID NO: 6717 - RNA, 20 nt, synthetic construct
  misc_feature 1..20: note = source = /note="Description of Artificial Sequence: Synthetic oligonucleotide"
  source 1..20: mol_type = other RNA
gcatcaaggactaaaggcga

SEQ ID NO: 6718 - RNA, 20 nt, synthetic construct
  misc_feature 1..20: note = source = /note="Description of Artificial Sequence: Synthetic oligonucleotide"
  source 1..20: mol_type = other RNA
tccccagcatcaaggactaa

SEQ ID NO: 6719 - RNA, 20 nt, synthetic construct
  misc_feature 1..20: note = source = /note="Description of Artificial Sequence: Synthetic oligonucleotide"
  source 1..20: mol_type = other RNA
ccaaaaggtccccagcatca

SEQ ID NO: 6720 - RNA, 20 nt, synthetic construct
  misc_feature 1..20: note = source = /note="Description of Artificial Sequence: Synthetic oligonucleotide"
  source 1..20: mol_type = other RNA
aagctgtcttcccaaccaaa

SEQ ID NO: 6721 - RNA, 20 nt, synthetic construct
  misc_feature 1..20: note = source = /note="Description of Artificial Sequence: Synthetic oligonucleotide"
  source 1..20: mol_type = other RNA
agcaggctcaccctgacata

SEQ ID NO: 6722 - RNA, 20 nt, synthetic construct
  misc_feature 1..20: note = source = /note="Description of Artificial Sequence: Synthetic oligonucleotide"
  source 1..20: mol_type = other RNA
gagttacatacctgtgtagc

SEQ ID NO: 6723 - RNA, 20 nt, synthetic construct
  misc_feature 1..20: note = source = /note="Description of Artificial Sequence: Synthetic oligonucleotide"
  source 1..20: mol_type = other RNA
ctaaacagaaactcaacagt

SEQ ID NO: 6724 - RNA, 20 nt, synthetic construct
  misc_feature 1..20: note = source = /note="Description of Artificial Sequence: Synthetic oligonucleotide"
  source 1..20: mol_type = other RNA
tccacgtttgtaccatttga

SEQ ID NO: 6725 - RNA, 20 nt, synthetic construct
  misc_feature 1..20: note = source = /note="Description of Artificial Sequence: Synthetic oligonucleotide"
  source 1..20: mol_type = other RNA
ctccacgtttgtaccatttg

SEQ ID NO: 6726 - RNA, 20 nt, synthetic construct
  misc_feature 1..20: note = source = /note="Description of Artificial Sequence: Synthetic oligonucleotide"
  source 1..20: mol_type = other RNA
agacaaaactaacaggacaa

SEQ ID NO: 6727 - RNA, 20 nt, synthetic construct
  misc_feature 1..20: note = source = /note="Description of Artificial Sequence: Synthetic oligonucleotide"
  source 1..20: mol_type = other RNA
ctgtgatagacaaaactaac

SEQ ID NO: 6728 - RNA, 20 nt, synthetic construct
  misc_feature 1..20: note = source = /note="Description of Artificial Sequence: Synthetic oligonucleotide"
  source 1..20: mol_type = other RNA
atctcttatttggagggcat

SEQ ID NO: 6729 - RNA, 20 nt, synthetic construct
  misc_feature 1..20: note = source = /note="Description of Artificial Sequence: Synthetic oligonucleotide"
  source 1..20: mol_type = other RNA
catctcttatttggagggca

SEQ ID NO: 6730 - RNA, 20 nt, synthetic construct
  misc_feature 1..20: note = source = /note="Description of Artificial Sequence: Synthetic oligonucleotide"
  source 1..20: mol_type = other RNA
tccatcatctcttatttgga

SEQ ID NO: 6731 - RNA, 20 nt, synthetic construct
  misc_feature 1..20: note = source = /note="Description of Artificial Sequence: Synthetic oligonucleotide"
  source 1..20: mol_type = other RNA
ctccatcatctcttatttgg

SEQ ID NO: 6732 - RNA, 20 nt, synthetic construct
  misc_feature 1..20: note = source = /note="Description of Artificial Sequence: Synthetic oligonucleotide"
  source 1..20: mol_type = other RNA
ctgctccatcatctcttatt

SEQ ID NO: 6733 - RNA, 20 nt, synthetic construct
  misc_feature 1..20: note = source = /note="Description of Artificial Sequence: Synthetic oligonucleotide"
  source 1..20: mol_type = other RNA
ccctcttttaaagtcagttg

SEQ ID NO: 6734 - RNA, 20 nt, synthetic construct
  misc_feature 1..20: note = source = /note="Description of Artificial Sequence: Synthetic oligonucleotide"
  source 1..20: mol_type = other RNA
taccttatcacggtcgactc

SEQ ID NO: 6735 - RNA, 20 nt, synthetic construct
  misc_feature 1..20: note = source = /note="Description of Artificial Sequence: Synthetic oligonucleotide"
  source 1..20: mol_type = other RNA
ggtaatcgtgattttatggt

SEQ ID NO: 6736 - RNA, 20 nt, synthetic construct
  misc_feature 1..20: note = source = /note="Description of Artificial Sequence: Synthetic oligonucleotide"
  source 1..20: mol_type = other RNA
tggaggacttgtagactagc

SEQ ID NO: 6737 - RNA, 20 nt, synthetic construct
  misc_feature 1..20: note = source = /note="Description of Artificial Sequence: Synthetic oligonucleotide"
  source 1..20: mol_type = other RNA
catgaacaaaatcaggctgg

SEQ ID NO: 6738 - RNA, 20 nt, synthetic construct
  misc_feature 1..20: note = source = /note="Description of Artificial Sequence: Synthetic oligonucleotide"
  source 1..20: mol_type = other RNA
gttcatgaacaaaatcaggc

SEQ ID NO: 6739 - RNA, 20 nt, synthetic construct
  misc_feature 1..20: note = source = /note="Description of Artificial Sequence: Synthetic oligonucleotide"
  source 1..20: mol_type = other RNA
tcatgttcatgaacaaaatc

SEQ ID NO: 6740 - RNA, 20 nt, synthetic construct
  misc_feature 1..20: note = source = /note="Description of Artificial Sequence: Synthetic oligonucleotide"
  source 1..20: mol_type = other RNA
aaagcagtatccaatattaa

SEQ ID NO: 6741 - RNA, 20 nt, synthetic construct
  misc_feature 1..20: note = source = /note="Description of Artificial Sequence: Synthetic oligonucleotide"
  source 1..20: mol_type = other RNA
tatttttgttcttgcgagac

SEQ ID NO: 6742 - RNA, 20 nt, synthetic construct
  misc_feature 1..20: note = source = /note="Description of Artificial Sequence: Synthetic oligonucleotide"
  source 1..20: mol_type = other RNA
caaacttgttttatatgact

SEQ ID NO: 6743 - RNA, 20 nt, synthetic construct
  misc_feature 1..20: note = source = /note="Description of Artificial Sequence: Synthetic oligonucleotide"
  source 1..20: mol_type = other RNA
catttccatatattaatgtt

SEQ ID NO: 6744 - RNA, 20 nt, synthetic construct
  misc_feature 1..20: note = source = /note="Description of Artificial Sequence: Synthetic oligonucleotide"
  source 1..20: mol_type = other RNA
gagaatcttataaaagcaac

SEQ ID NO: 6745 - RNA, 20 nt, synthetic construct
  misc_feature 1..20: note = source = /note="Description of Artificial Sequence: Synthetic oligonucleotide"
  source 1..20: mol_type = other RNA
aaggagagttctcatgctta

SEQ ID NO: 6746 - RNA, 20 nt, synthetic construct
  misc_feature 1..20: note = source = /note="Description of Artificial Sequence: Synthetic oligonucleotide"
  source 1..20: mol_type = other RNA
gtctccctttgtacttcaaa

SEQ ID NO: 6747 - RNA, 20 nt, synthetic construct
  misc_feature 1..20: note = source = /note="Description of Artificial Sequence: Synthetic oligonucleotide"
  source 1..20: mol_type = other RNA
aatctgttggctattctgaa

SEQ ID NO: 6748 - RNA, 20 nt, synthetic construct
  misc_feature 1..20: note = source = /note="Description of Artificial Sequence: Synthetic oligonucleotide"
  source 1..20: mol_type = other RNA
aactcttgtttaaaatctgt

SEQ ID NO: 6749 - RNA, 20 nt, synthetic construct
  misc_feature 1..20: note = source = /note="Description of Artificial Sequence: Synthetic oligonucleotide"
  source 1..20: mol_type = other RNA
atagccaaaacaagcagaaa

SEQ ID NO: 6750 - RNA, 20 nt, synthetic construct
  misc_feature 1..20: note = source = /note="Description of Artificial Sequence: Synthetic oligonucleotide"
  source 1..20: mol_type = other RNA
catagccaaaacaagcagaa

SEQ ID NO: 6751 - RNA, 20 nt, synthetic construct
  misc_feature 1..20: note = source = /note="Description of Artificial Sequence: Synthetic oligonucleotide"
  source 1..20: mol_type = other RNA
cttaaatacagacactgaaa

SEQ ID NO: 6752 - RNA, 20 nt, synthetic construct
  misc_feature 1..20: note = source = /note="Description of Artificial Sequence: Synthetic oligonucleotide"
  source 1..20: mol_type = other RNA
tttcacatccgaaatcatac

SEQ ID NO: 6753 - RNA, 20 nt, synthetic construct
  misc_feature 1..20: note = source = /note="Description of Artificial Sequence: Synthetic oligonucleotide"
  source 1..20: mol_type = other RNA
cacagcagtataggttaaca

SEQ ID NO: 6754 - RNA, 20 nt, synthetic construct
  misc_feature 1..20: note = source = /note="Description of Artificial Sequence: Synthetic oligonucleotide"
  source 1..20: mol_type = other RNA
aatgacttccacagcagtat

SEQ ID NO: 6755 - RNA, 20 nt, synthetic construct
  misc_feature 1..20: note = source = /note="Description of Artificial Sequence: Synthetic oligonucleotide"
  source 1..20: mol_type = other RNA
aagagtgataaagttaaatt

SEQ ID NO: 6756 - RNA, 20 nt, synthetic construct
  misc_feature 1..20: note = source = /note="Description of Artificial Sequence: Synthetic oligonucleotide"
  source 1..20: mol_type = other RNA
agatagaagttatcgtctgt

SEQ ID NO: 6757 - RNA, 20 nt, synthetic construct
  misc_feature 1..20: note = source = /note="Description of Artificial Sequence: Synthetic oligonucleotide"
  source 1..20: mol_type = other RNA
tcaatgaattcttctttggt

SEQ ID NO: 6758 - RNA, 20 nt, synthetic construct
  misc_feature 1..20: note = source = /note="Description of Artificial Sequence: Synthetic oligonucleotide"
  source 1..20: mol_type = other RNA
atatgaggggtaaccacact

SEQ ID NO: 6759 - RNA, 20 nt, synthetic construct
  misc_feature 1..20: note = source = /note="Description of Artificial Sequence: Synthetic oligonucleotide"
  source 1..20: mol_type = other RNA
gatatgaggggtaaccacac

SEQ ID NO: 6760 - RNA, 20 nt, synthetic construct
  misc_feature 1..20: note = source = /note="Description of Artificial Sequence: Synthetic oligonucleotide"
  source 1..20: mol_type = other RNA
gacagtagatatgaggggta

SEQ ID NO: 6761 - RNA, 20 nt, synthetic construct
  misc_feature 1..20: note = source = /note="Description of Artificial Sequence: Synthetic oligonucleotide"
  source 1..20: mol_type = other RNA
gtttaagttgaataggtttt

SEQ ID NO: 6762 - RNA, 20 nt, synthetic construct
  misc_feature 1..20: note = source = /note="Description of Artificial Sequence: Synthetic oligonucleotide"
  source 1..20: mol_type = other RNA
agacatggacatacagggta

SEQ ID NO: 6763 - RNA, 20 nt, synthetic construct
  misc_feature 1..20: note = source = /note="Description of Artificial Sequence: Synthetic oligonucleotide"
  source 1..20: mol_type = other RNA
gaagtcgtctcaagtgttaa

SEQ ID NO: 6764 - RNA, 20 nt, synthetic construct
  misc_feature 1..20: note = source = /note="Description of Artificial Sequence: Synthetic oligonucleotide"
  source 1..20: mol_type = other RNA
aggtgacccaagagatggcc

SEQ ID NO: 6765 - RNA, 20 nt, synthetic construct
  misc_feature 1..20: note = source = /note="Description of Artificial Sequence: Synthetic oligonucleotide"
  source 1..20: mol_type = other RNA
tggcaaggtgacccaagaga

SEQ ID NO: 6766 - RNA, 20 nt, synthetic construct
  misc_feature 1..20: note = source = /note="Description of Artificial Sequence: Synthetic oligonucleotide"
  source 1..20: mol_type = other RNA
aagagaatgaaaagttggca

SEQ ID NO: 6767 - RNA, 20 nt, synthetic construct
  misc_feature 1..20: note = source = /note="Description of Artificial Sequence: Synthetic oligonucleotide"
  source 1..20: mol_type = other RNA
ttgtaaagagaatgaaaagt

SEQ ID NO: 6768 - RNA, 20 nt, synthetic construct
  misc_feature 1..20: note = source = /note="Description of Artificial Sequence: Synthetic oligonucleotide"
  source 1..20: mol_type = other RNA
caaggtgacccaagataagt

SEQ ID NO: 6769 - RNA, 20 nt, synthetic construct
  misc_feature 1..20: note = source = /note="Description of Artificial Sequence: Synthetic oligonucleotide"
  source 1..20: mol_type = other RNA
aagagaatgaaaagttagca

SEQ ID NO: 6770 - RNA, 20 nt, synthetic construct
  misc_feature 1..20: note = source = /note="Description of Artificial Sequence: Synthetic oligonucleotide"
  source 1..20: mol_type = other RNA
gagaagccagcttgagaatg

SEQ ID NO: 6771 - RNA, 20 nt, synthetic construct
  misc_feature 1..20: note = source = /note="Description of Artificial Sequence: Synthetic oligonucleotide"
  source 1..20: mol_type = other RNA
agagaagccagcttgagaat

SEQ ID NO: 6772 - RNA, 20 nt, synthetic construct
  misc_feature 1..20: note = source = /note="Description of Artificial Sequence: Synthetic oligonucleotide"
  source 1..20: mol_type = other RNA
cagagaagccagcttgagaa

SEQ ID NO: 6773 - RNA, 20 nt, synthetic construct
  misc_feature 1..20: note = source = /note="Description of Artificial Sequence: Synthetic oligonucleotide"
  source 1..20: mol_type = other RNA
ctgctcaatgctagccattt

SEQ ID NO: 6774 - RNA, 20 nt, synthetic construct
  misc_feature 1..20: note = source = /note="Description of Artificial Sequence: Synthetic oligonucleotide"
  source 1..20: mol_type = other RNA
cctgctcaatgctagccatt

SEQ ID NO: 6775 - RNA, 20 nt, synthetic construct
  misc_feature 1..20: note = source = /note="Description of Artificial Sequence: Synthetic oligonucleotide"
  source 1..20: mol_type = other RNA
taattcagaggagtatgttg

SEQ ID NO: 6776 - RNA, 20 nt, synthetic construct
  misc_feature 1..20: note = source = /note="Description of Artificial Sequence: Synthetic oligonucleotide"
  source 1..20: mol_type = other RNA
gtaattcagaggagtatgtt

SEQ ID NO: 6777 - RNA, 20 nt, synthetic construct
  misc_feature 1..20: note = source = /note="Description of Artificial Sequence: Synthetic oligonucleotide"
  source 1..20: mol_type = other RNA
tgtaattcagaggagtatgt

SEQ ID NO: 6778 - RNA, 20 nt, synthetic construct
  misc_feature 1..20: note = source = /note="Description of Artificial Sequence: Synthetic oligonucleotide"
  source 1..20: mol_type = other RNA
taactcaaaatgtaattcag

SEQ ID NO: 6779 - RNA, 20 nt, synthetic construct
  misc_feature 1..20: note = source = /note="Description of Artificial Sequence: Synthetic oligonucleotide"
  source 1..20: mol_type = other RNA
tctctatcccttatacttaa

SEQ ID NO: 6780 - RNA, 20 nt, synthetic construct
  misc_feature 1..20: note = source = /note="Description of Artificial Sequence: Synthetic oligonucleotide"
  source 1..20: mol_type = other RNA
agaagtataaactgattaaa

SEQ ID NO: 6781 - RNA, 20 nt, synthetic construct
  misc_feature 1..20: note = source = /note="Description of Artificial Sequence: Synthetic oligonucleotide"
  source 1..20: mol_type = other RNA
ctcagcaactttttgatgac

SEQ ID NO: 6782 - RNA, 20 nt, synthetic construct
  misc_feature 1..20: note = source = /note="Description of Artificial Sequence: Synthetic oligonucleotide"
  source 1..20: mol_type = other RNA
tcctaaactttgagattaat

SEQ ID NO: 6783 - RNA, 20 nt, synthetic construct
  misc_feature 1..20: note = source = /note="Description of Artificial Sequence: Synthetic oligonucleotide"
  source 1..20: mol_type = other RNA
aggttaccacgtcaaaaagc

SEQ ID NO: 6784 - RNA, 20 nt, synthetic construct
  misc_feature 1..20: note = source = /note="Description of Artificial Sequence: Synthetic oligonucleotide"
  source 1..20: mol_type = other RNA
ctgtttccttttgttatggc

SEQ ID NO: 6785 - RNA, 20 nt, synthetic construct
  misc_feature 1..20: note = source = /note="Description of Artificial Sequence: Synthetic oligonucleotide"
  source 1..20: mol_type = other RNA
cctgctgtttccttttgtta

SEQ ID NO: 6786 - RNA, 20 nt, synthetic construct
  misc_feature 1..20: note = source = /note="Description of Artificial Sequence: Synthetic oligonucleotide"
  source 1..20: mol_type = other RNA
gggaagaagactgttttaat

SEQ ID NO: 6787 - RNA, 20 nt, synthetic construct
  misc_feature 1..20: note = source = /note="Description of Artificial Sequence: Synthetic oligonucleotide"
  source 1..20: mol_type = other RNA
gctgacagttcgttctttgg

SEQ ID NO: 6788 - RNA, 20 nt, synthetic construct
  misc_feature 1..20: note = source = /note="Description of Artificial Sequence: Synthetic oligonucleotide"
  source 1..20: mol_type = other RNA
tgctgacagttcgttctttg

SEQ ID NO: 6789 - RNA, 20 nt, synthetic construct
  misc_feature 1..20: note = source = /note="Description of Artificial Sequence: Synthetic oligonucleotide"
  source 1..20: mol_type = other RNA
ttgctgacagttcgttcttt

SEQ ID NO: 6790 - RNA, 20 nt, synthetic construct
  misc_feature 1..20: note = source = /note="Description of Artificial Sequence: Synthetic oligonucleotide"
  source 1..20: mol_type = other RNA
tttgctgacagttcgttctt

SEQ ID NO: 6791 - RNA, 20 nt, synthetic construct
  misc_feature 1..20: note = source = /note="Description of Artificial Sequence: Synthetic oligonucleotide"
  source 1..20: mol_type = other RNA
aatgccaaacttaattctac

SEQ ID NO: 6792 - RNA, 20 nt, synthetic construct
  misc_feature 1..20: note = source = /note="Description of Artificial Sequence: Synthetic oligonucleotide"
  source 1..20: mol_type = other RNA
atatatatatccatgccttg

SEQ ID NO: 6793 - RNA, 20 nt, synthetic construct
  misc_feature 1..20: note = source = /note="Description of Artificial Sequence: Synthetic oligonucleotide"
  source 1..20: mol_type = other RNA
gaatacacaccaaaagtgaa

SEQ ID NO: 6794 - RNA, 20 nt, synthetic construct
  misc_feature 1..20: note = source = /note="Description of Artificial Sequence: Synthetic oligonucleotide"
  source 1..20: mol_type = other RNA
ctggttgaataactcacagc

SEQ ID NO: 6795 - RNA, 20 nt, synthetic construct
  misc_feature 1..20: note = source = /note="Description of Artificial Sequence: Synthetic oligonucleotide"
  source 1..20: mol_type = other RNA
agactcaaacttagtgagcc

SEQ ID NO: 6796 - RNA, 20 nt, synthetic construct
  misc_feature 1..20: note = source = /note="Description of Artificial Sequence: Synthetic oligonucleotide"
  source 1..20: mol_type = other RNA
agatttcctccctatttgga

SEQ ID NO: 6797 - RNA, 20 nt, synthetic construct
  misc_feature 1..20: note = source = /note="Description of Artificial Sequence: Synthetic oligonucleotide"
  source 1..20: mol_type = other RNA
tttcagatttcctccctatt

SEQ ID NO: 6798 - RNA, 20 nt, synthetic construct
  misc_feature 1..20: note = source = /note="Description of Artificial Sequence: Synthetic oligonucleotide"
  source 1..20: mol_type = other RNA
cagagcatctcagtcaacac

SEQ ID NO: 6799 - RNA, 20 nt, synthetic construct
  misc_feature 1..20: note = source = /note="Description of Artificial Sequence: Synthetic oligonucleotide"
  source 1..20: mol_type = other RNA
agttggtgagctctgagtcc

SEQ ID NO: 6800 - RNA, 20 nt, synthetic construct
  misc_feature 1..20: note = source = /note="Description of Artificial Sequence: Synthetic oligonucleotide"
  source 1..20: mol_type = other RNA
ttaacataaagatccaaagt

SEQ ID NO: 6801 - RNA, 20 nt, synthetic construct
  misc_feature 1..20: note = source = /note="Description of Artificial Sequence: Synthetic oligonucleotide"
  source 1..20: mol_type = other RNA
agccactgacctatatcaag

SEQ ID NO: 6802 - RNA, 20 nt, synthetic construct
  misc_feature 1..20: note = source = /note="Description of Artificial Sequence: Synthetic oligonucleotide"
  source 1..20: mol_type = other RNA
tttagttaaaagaaagttgt

SEQ ID NO: 6803 - RNA, 20 nt, synthetic construct
  misc_feature 1..20: note = source = /note="Description of Artificial Sequence: Synthetic oligonucleotide"
  source 1..20: mol_type = other RNA
cccattgtgacaaaccaact

SEQ ID NO: 6804 - RNA, 20 nt, synthetic construct
  misc_feature 1..20: note = source = /note="Description of Artificial Sequence: Synthetic oligonucleotide"
  source 1..20: mol_type = other RNA
ttataaaagcatcttcacca

SEQ ID NO: 6805 - RNA, 20 nt, synthetic construct
  misc_feature 1..20: note = source = /note="Description of Artificial Sequence: Synthetic oligonucleotide"
  source 1..20: mol_type = other RNA
tgtttaaaataattctttca

SEQ ID NO: 6806 - RNA, 20 nt, synthetic construct
  misc_feature 1..20: note = source = /note="Description of Artificial Sequence: Synthetic oligonucleotide"
  source 1..20: mol_type = other RNA
acgacagtggtagagtaacg

SEQ ID NO: 6807 - RNA, 20 nt, synthetic construct
  misc_feature 1..20: note = source = /note="Description of Artificial Sequence: Synthetic oligonucleotide"
  source 1..20: mol_type = other RNA
acaggaatgaaaatgatggt

SEQ ID NO: 6808 - RNA, 20 nt, synthetic construct
  misc_feature 1..20: note = source = /note="Description of Artificial Sequence: Synthetic oligonucleotide"
  source 1..20: mol_type = other RNA
ggcaaattttttattggata

SEQ ID NO: 6809 - RNA, 20 nt, synthetic construct
  misc_feature 1..20: note = source = /note="Description of Artificial Sequence: Synthetic oligonucleotide"
  source 1..20: mol_type = other RNA
tcaatgaattcttctttggt

SEQ ID NO: 6810 - RNA, 20 nt, synthetic construct
  misc_feature 1..20: note = source = /note="Description of Artificial Sequence: Synthetic oligonucleotide"
  source 1..20: mol_type = other RNA
tgtaaggggtagtcacactc

SEQ ID NO: 6811 - RNA, 20 nt, synthetic construct
  misc_feature 1..20: note = source = /note="Description of Artificial Sequence: Synthetic oligonucleotide"
  source 1..20: mol_type = other RNA
atgtaaggggtagtcacact

SEQ ID NO: 6812 - RNA, 20 nt, synthetic construct
  misc_feature 1..20: note = source = /note="Description of Artificial Sequence: Synthetic oligonucleotide"
  source 1..20: mol_type = other RNA
gatgtaaggggtagtcacac

SEQ ID NO: 6813 - RNA, 20 nt, synthetic construct
  misc_feature 1..20: note = source = /note="Description of Artificial Sequence: Synthetic oligonucleotide"
  source 1..20: mol_type = other RNA
gtttgagatgaataggtttt

SEQ ID NO: 6814 - RNA, 20 nt, synthetic construct
  misc_feature 1..20: note = source = /note="Description of Artificial Sequence: Synthetic oligonucleotide"
  source 1..20: mol_type = other RNA
agacatggacatacagggta

SEQ ID NO: 6815 - RNA, 20 nt, synthetic construct
  misc_feature 1..20: note = source = /note="Description of Artificial Sequence: Synthetic oligonucleotide"
  source 1..20: mol_type = other RNA
gaagtcgtctcaagtgttaa

SEQ ID NO: 6816 - RNA, 20 nt, synthetic construct
  misc_feature 1..20: note = source = /note="Description of Artificial Sequence: Synthetic oligonucleotide"
  source 1..20: mol_type = other RNA
tccactgggttctctaccgg

SEQ ID NO: 6817 - RNA, 20 nt, synthetic construct
  misc_feature 1..20: note = source = /note="Description of Artificial Sequence: Synthetic oligonucleotide"
  source 1..20: mol_type = other RNA
gttgttccactgggttctct

SEQ ID NO: 6818 - RNA, 20 nt, synthetic construct
  misc_feature 1..20: note = source = /note="Description of Artificial Sequence: Synthetic oligonucleotide"
  source 1..20: mol_type = other RNA
ttctcttacttttcagttgt

SEQ ID NO: 6819 - RNA, 20 nt, synthetic construct
  misc_feature 1..20: note = source = /note="Description of Artificial Sequence: Synthetic oligonucleotide"
  source 1..20: mol_type = other RNA
ctcttcggtcggactctaac

SEQ ID NO: 6820 - RNA, 20 nt, synthetic construct
  misc_feature 1..20: note = source = /note="Description of Artificial Sequence: Synthetic oligonucleotide"
  source 1..20: mol_type = other RNA
cctcttcggtcggactctaa

SEQ ID NO: 6821 - RNA, 20 nt, synthetic construct
  misc_feature 1..20: note = source = /note="Description of Artificial Sequence: Synthetic oligonucleotide"
  source 1..20: mol_type = other RNA
acctcttcggtcggactcta

SEQ ID NO: 6822 - RNA, 20 nt, synthetic construct
  misc_feature 1..20: note = source = /note="Description of Artificial Sequence: Synthetic oligonucleotide"
  source 1..20: mol_type = other RNA
tagggttcattctcatgtca

SEQ ID NO: 6823 - RNA, 20 nt, synthetic construct
  misc_feature 1..20: note = source = /note="Description of Artificial Sequence: Synthetic oligonucleotide"
  source 1..20: mol_type = other RNA
cttgacacaattggatggtt

SEQ ID NO: 6824 - RNA, 20 nt, synthetic construct
  misc_feature 1..20: note = source = /note="Description of Artificial Sequence: Synthetic oligonucleotide"
  source 1..20: mol_type = other RNA
ttagtcgttccccagattcg

SEQ ID NO: 6825 - RNA, 20 nt, synthetic construct
  misc_feature 1..20: note = source = /note="Description of Artificial Sequence: Synthetic oligonucleotide"
  source 1..20: mol_type = other RNA
gttcagtcctttagtcgttc

SEQ ID NO: 6826 - RNA, 20 nt, synthetic construct
  misc_feature 1..20: note = source = /note="Description of Artificial Sequence: Synthetic oligonucleotide"
  source 1..20: mol_type = other RNA
tgttcagtcctttagtcgtt

SEQ ID NO: 6827 - RNA, 20 nt, synthetic construct
  misc_feature 1..20: note = source = /note="Description of Artificial Sequence: Synthetic oligonucleotide"
  source 1..20: mol_type = other RNA
atgttcagtcctttagtcgt

SEQ ID NO: 6828 - RNA, 20 nt, synthetic construct
  misc_feature 1..20: note = source = /note="Description of Artificial Sequence: Synthetic oligonucleotide"
  source 1..20: mol_type = other RNA
ccgtcaactcacatgttcag

SEQ ID NO: 6829 - RNA, 20 nt, synthetic construct
  misc_feature 1..20: note = source = /note="Description of Artificial Sequence: Synthetic oligonucleotide"
  source 1..20: mol_type = other RNA
aatttcacccatataatccg

SEQ ID NO: 6830 - RNA, 20 nt, synthetic construct
  misc_feature 1..20: note = source = /note="Description of Artificial Sequence: Synthetic oligonucleotide"
  source 1..20: mol_type = other RNA
tagtaatttcacccatataa

SEQ ID NO: 6831 - RNA, 20 nt, synthetic construct
  misc_feature 1..20: note = source = /note="Description of Artificial Sequence: Synthetic oligonucleotide"
  source 1..20: mol_type = other RNA
tacatgtaatagtaatttca

SEQ ID NO: 6832 - RNA, 20 nt, synthetic construct
  misc_feature 1..20: note = source = /note="Description of Artificial Sequence: Synthetic oligonucleotide"
  source 1..20: mol_type = other RNA
ctacatgtaatagtaatttc

SEQ ID NO: 6833 - RNA, 20 nt, synthetic construct
  misc_feature 1..20: note = source = /note="Description of Artificial Sequence: Synthetic oligonucleotide"
  source 1..20: mol_type = other RNA
atactgactgtctttttaat

SEQ ID NO: 6834 - RNA, 20 nt, synthetic construct
  misc_feature 1..20: note = source = /note="Description of Artificial Sequence: Synthetic oligonucleotide"
  source 1..20: mol_type = other RNA
taaacaatcctacccattta

SEQ ID NO: 6835 - RNA, 20 nt, synthetic construct
  misc_feature 1..20: note = source = /note="Description of Artificial Sequence: Synthetic oligonucleotide"
  source 1..20: mol_type = other RNA
ataaacaatcctacccattt

SEQ ID NO: 6836 - RNA, 20 nt, synthetic construct
  misc_feature 1..20: note = source = /note="Description of Artificial Sequence: Synthetic oligonucleotide"
  source 1..20: mol_type = other RNA
taccacgataaacaatccta

SEQ ID NO: 6837 - RNA, 20 nt, synthetic construct
  misc_feature 1..20: note = source = /note="Description of Artificial Sequence: Synthetic oligonucleotide"
  source 1..20: mol_type = other RNA
ctaccacgataaacaatcct

SEQ ID NO: 6838 - RNA, 20 nt, synthetic construct
  misc_feature 1..20: note = source = /note="Description of Artificial Sequence: Synthetic oligonucleotide"
  source 1..20: mol_type = other RNA
actactaccacgataaacaa

SEQ ID NO: 6839 - RNA, 20 nt, synthetic construct
  misc_feature 1..20: note = source = /note="Description of Artificial Sequence: Synthetic oligonucleotide"
  source 1..20: mol_type = other RNA
aactcgattttccaactact

SEQ ID NO: 6840 - RNA, 20 nt, synthetic construct
  misc_feature 1..20: note = source = /note="Description of Artificial Sequence: Synthetic oligonucleotide"
  source 1..20: mol_type = other RNA
ctcaaaacagaactcgattt

SEQ ID NO: 6841 - RNA, 20 nt, synthetic construct
  misc_feature 1..20: note = source = /note="Description of Artificial Sequence: Synthetic oligonucleotide"
  source 1..20: mol_type = other RNA
ctacactctttcatgtactt

SEQ ID NO: 6842 - RNA, 20 nt, synthetic construct
  misc_feature 1..20: note = source = /note="Description of Artificial Sequence: Synthetic oligonucleotide"
  source 1..20: mol_type = other RNA
ctttgtcttgttgaaccatt

SEQ ID NO: 6843 - RNA, 20 nt, synthetic construct
  misc_feature 1..20: note = source = /note="Description of Artificial Sequence: Synthetic oligonucleotide"
  source 1..20: mol_type = other RNA
ttccgtctttgtcttgttga

SEQ ID NO: 6844 - RNA, 20 nt, synthetic construct
  misc_feature 1..20: note = source = /note="Description of Artificial Sequence: Synthetic oligonucleotide"
  source 1..20: mol_type = other RNA
tttaaatcctgtgtaaaact

SEQ ID NO: 6845 - RNA, 20 nt, synthetic construct
  misc_feature 1..20: note = source = /note="Description of Artificial Sequence: Synthetic oligonucleotide"
  source 1..20: mol_type = other RNA
cgtctctttacctatttaaa

SEQ ID NO: 6846 - RNA, 20 nt, synthetic construct
  misc_feature 1..20: note = source = /note="Description of Artificial Sequence: Synthetic oligonucleotide"
  source 1..20: mol_type = other RNA
cttatcgtcaccgtctcttt

SEQ ID NO: 6847 - RNA, 20 nt, synthetic construct
  misc_feature 1..20: note = source = /note="Description of Artificial Sequence: Synthetic oligonucleotide"
  source 1..20: mol_type = other RNA
ggacttgatctcttatcgtc

SEQ ID NO: 6848 - RNA, 20 nt, synthetic construct
  misc_feature 1..20: note = source = /note="Description of Artificial Sequence: Synthetic oligonucleotide"
  source 1..20: mol_type = other RNA
tggcgtcattatgttctctt

SEQ ID NO: 6849 - RNA, 20 nt, synthetic construct
  misc_feature 1..20: note = source = /note="Description of Artificial Sequence: Synthetic oligonucleotide"
  source 1..20: mol_type = other RNA
tctggaaattttctagtgag

SEQ ID NO: 6850 - RNA, 20 nt, synthetic construct
  misc_feature 1..20: note = source = /note="Description of Artificial Sequence: Synthetic oligonucleotide"
  source 1..20: mol_type = other RNA
atttaggtcacccttcggta

SEQ ID NO: 6851 - RNA, 20 nt, synthetic construct
  misc_feature 1..20: note = source = /note="Description of Artificial Sequence: Synthetic oligonucleotide"
  source 1..20: mol_type = other RNA
ctaataataaatttaggtca

SEQ ID NO: 6852 - RNA, 20 nt, synthetic construct
  misc_feature 1..20: note = source = /note="Description of Artificial Sequence: Synthetic oligonucleotide"
  source 1..20: mol_type = other RNA
tctaataataaatttaggtc

SEQ ID NO: 6853 - RNA, 20 nt, synthetic construct
  misc_feature 1..20: note = source = /note="Description of Artificial Sequence: Synthetic oligonucleotide"
  source 1..20: mol_type = other RNA
cttcatacatttccggtacc

SEQ ID NO: 6854 - RNA, 20 nt, synthetic construct
  misc_feature 1..20: note = source = /note="Description of Artificial Sequence: Synthetic oligonucleotide"
  source 1..20: mol_type = other RNA
gatcttcatacatttccggt

SEQ ID NO: 6855 - RNA, 20 nt, synthetic construct
  misc_feature 1..20: note = source = /note="Description of Artificial Sequence: Synthetic oligonucleotide"
  source 1..20: mol_type = other RNA
cacgccgatcttcatacatt

SEQ ID NO: 6856 - RNA, 20 nt, synthetic construct
  misc_feature 1..20: note = source = /note="Description of Artificial Sequence: Synthetic oligonucleotide"
  source 1..20: mol_type = other RNA
ttctcctcacaaaactccac

SEQ ID NO: 6857 - RNA, 20 nt, synthetic construct
  misc_feature 1..20: note = source = /note="Description of Artificial Sequence: Synthetic oligonucleotide"
  source 1..20: mol_type = other RNA
acttgttctcctcacaaaac

SEQ ID NO: 6858 - RNA, 20 nt, synthetic construct
  misc_feature 1..20: note = source = /note="Description of Artificial Sequence: Synthetic oligonucleotide"
  source 1..20: mol_type = other RNA
caatcaagagtcacttgttc

SEQ ID NO: 6859 - RNA, 20 nt, synthetic construct
  misc_feature 1..20: note = source = /note="Description of Artificial Sequence: Synthetic oligonucleotide"
  source 1..20: mol_type = other RNA
atcgactcctcttctctttg

SEQ ID NO: 6860 - RNA, 20 nt, synthetic construct
  misc_feature 1..20: note = source = /note="Description of Artificial Sequence: Synthetic oligonucleotide"
  source 1..20: mol_type = other RNA
tttaatcgtactatatcgac

SEQ ID NO: 6861 - RNA, 20 nt, synthetic construct
  misc_feature 1..20: note = source = /note="Description of Artificial Sequence: Synthetic oligonucleotide"
  source 1..20: mol_type = other RNA
tctcccttgttttcatgttt

SEQ ID NO: 6862 - RNA, 20 nt, synthetic construct
  misc_feature 1..20: note = source = /note="Description of Artificial Sequence: Synthetic oligonucleotide"
  source 1..20: mol_type = other RNA
ccttcttactaagtcgatct

SEQ ID NO: 6863 - RNA, 20 nt, synthetic construct
  misc_feature 1..20: note = source = /note="Description of Artificial Sequence: Synthetic oligonucleotide"
  source 1..20: mol_type = other RNA
accttcttactaagtcgatc

SEQ ID NO: 6864 - RNA, 20 nt, synthetic construct
  misc_feature 1..20: note = source = /note="Description of Artificial Sequence: Synthetic oligonucleotide"
  source 1..20: mol_type = other RNA
ttcggttactatcttactgg

SEQ ID NO: 6865 - RNA, 20 nt, synthetic construct
  misc_feature 1..20: note = source = /note="Description of Artificial Sequence: Synthetic oligonucleotide"
  source 1..20: mol_type = other RNA
gataaatctatctcgtccat

SEQ ID NO: 6866 - RNA, 20 nt, synthetic construct
  misc_feature 1..20: note = source = /note="Description of Artificial Sequence: Synthetic oligonucleotide"
  source 1..20: mol_type = other RNA
gtcctgataaatctatctcg

SEQ ID NO: 6867 - RNA, 20 nt, synthetic construct
  misc_feature 1..20: note = source = /note="Description of Artificial Sequence: Synthetic oligonucleotide"
  source 1..20: mol_type = other RNA
ctctatttctcctgattttg

SEQ ID NO: 6868 - RNA, 20 nt, synthetic construct
  misc_feature 1..20: note = source = /note="Description of Artificial Sequence: Synthetic oligonucleotide"
  source 1..20: mol_type = other RNA
tagactcactactctatttc

SEQ ID NO: 6869 - RNA, 20 nt, synthetic construct
  misc_feature 1..20: note = source = /note="Description of Artificial Sequence: Synthetic oligonucleotide"
  source 1..20: mol_type = other RNA
gtctgactactcacgatact

SEQ ID NO: 6870 - RNA, 20 nt, synthetic construct
  misc_feature 1..20: note = source = /note="Description of Artificial Sequence: Synthetic oligonucleotide"
  source 1..20: mol_type = other RNA
agtctgactactcacgatac

SEQ ID NO: 6871 - RNA, 20 nt, synthetic construct
  misc_feature 1..20: note = source = /note="Description of Artificial Sequence: Synthetic oligonucleotide"
  source 1..20: mol_type = other RNA
atccctacttgttctatcag

SEQ ID NO: 6872 - RNA, 20 nt, synthetic construct
  misc_feature 1..20: note = source = /note="Description of Artificial Sequence: Synthetic oligonucleotide"
  source 1..20: mol_type = other RNA
aagatccaagatccctacat

SEQ ID NO: 6873 - RNA, 20 nt, synthetic construct
  misc_feature 1..20: note = source = /note="Description of Artificial Sequence: Synthetic oligonucleotide"
  source 1..20: mol_type = other RNA
caagatccaagatccctaca

SEQ ID NO: 6874 - RNA, 20 nt, synthetic construct
  misc_feature 1..20: note = source = /note="Description of Artificial Sequence: Synthetic oligonucleotide"
  source 1..20: mol_type = other RNA
tgtataacaagatccaagat

SEQ ID NO: 6875 - RNA, 20 nt, synthetic construct
  misc_feature 1..20: note = source = /note="Description of Artificial Sequence: Synthetic oligonucleotide"
  source 1..20: mol_type = other RNA
ttgtataacaagatccaaga

SEQ ID NO: 6876 - RNA, 20 nt, synthetic construct
  misc_feature 1..20: note = source = /note="Description of Artificial Sequence: Synthetic oligonucleotide"
  source 1..20: mol_type = other RNA
atagaaattgtataacaaga

SEQ ID NO: 6877 - RNA, 20 nt, synthetic construct
  misc_feature 1..20: note = source = /note="Description of Artificial Sequence: Synthetic oligonucleotide"
  source 1..20: mol_type = other RNA
gtcacctcagggggctggac

SEQ ID NO: 6878 - RNA, 20 nt, synthetic construct
  misc_feature 1..20: note = source = /note="Description of Artificial Sequence: Synthetic oligonucleotide"
  source 1..20: mol_type = other RNA
tgctggtcacctcagggggc

SEQ ID NO: 6879 - RNA, 20 nt, synthetic construct
  misc_feature 1..20: note = source = /note="Description of Artificial Sequence: Synthetic oligonucleotide"
  source 1..20: mol_type = other RNA
taaatgctggtcacctcagg

SEQ ID NO: 6880 - RNA, 20 nt, synthetic construct
  misc_feature 1..20: note = source = /note="Description of Artificial Sequence: Synthetic oligonucleotide"
  source 1..20: mol_type = other RNA
ctaaatgctggtcacctcag

SEQ ID NO: 6881 - RNA, 20 nt, synthetic construct
  misc_feature 1..20: note = source = /note="Description of Artificial Sequence: Synthetic oligonucleotide"
  source 1..20: mol_type = other RNA
cctaaatgctggtcacctca

SEQ ID NO: 6882 - RNA, 20 nt, synthetic construct
  misc_feature 1..20: note = source = /note="Description of Artificial Sequence: Synthetic oligonucleotide"
  source 1..20: mol_type = other RNA
ccctaaatgctggtcacctc

SEQ ID NO: 6883 - RNA, 20 nt, synthetic construct
  misc_feature 1..20: note = source = /note="Description of Artificial Sequence: Synthetic oligonucleotide"
  source 1..20: mol_type = other RNA
tcggcttattccctaaatgc

SEQ ID NO: 6884 - RNA, 20 nt, synthetic construct
  misc_feature 1..20: note = source = /note="Description of Artificial Sequence: Synthetic oligonucleotide"
  source 1..20: mol_type = other RNA
ttaatggccctcctctgcct

SEQ ID NO: 6885 - RNA, 20 nt, synthetic construct
  misc_feature 1..20: note = source = /note="Description of Artificial Sequence: Synthetic oligonucleotide"
  source 1..20: mol_type = other RNA
ctctcattgctccttcttaa

SEQ ID NO: 6886 - RNA, 20 nt, synthetic construct
  misc_feature 1..20: note = source = /note="Description of Artificial Sequence: Synthetic oligonucleotide"
  source 1..20: mol_type = other RNA
gttaggacactctcacttta

SEQ ID NO: 6887 - RNA, 20 nt, synthetic construct
  misc_feature 1..20: note = source = /note="Description of Artificial Sequence: Synthetic oligonucleotide"
  source 1..20: mol_type = other RNA
tgttaggacactctcacttt

SEQ ID NO: 6888 - RNA, 20 nt, synthetic construct
  misc_feature 1..20: note = source = /note="Description of Artificial Sequence: Synthetic oligonucleotide"
  source 1..20: mol_type = other RNA
ctttcatttagacctgtgtt

SEQ ID NO: 6889 - RNA, 20 nt, synthetic construct
  misc_feature 1..20: note = source = /note="Description of Artificial Sequence: Synthetic oligonucleotide"
  source 1..20: mol_type = other RNA
cagaatttccctatctttca

SEQ ID NO: 6890 - RNA, 20 nt, synthetic construct
  misc_feature 1..20: note = source = /note="Description of Artificial Sequence: Synthetic oligonucleotide"
  source 1..20: mol_type = other RNA
gggatgactattccccaaac

SEQ ID NO: 6891 - RNA, 20 nt, synthetic construct
  misc_feature 1..20: note = source = /note="Description of Artificial Sequence: Synthetic oligonucleotide"
  source 1..20: mol_type = other RNA
ctctattgtgaaagacaaat

SEQ ID NO: 6892 - RNA, 20 nt, synthetic construct
  misc_feature 1..20: note = source = /note="Description of Artificial Sequence: Synthetic oligonucleotide"
  source 1..20: mol_type = other RNA
actctattgtgaaagacaaa

SEQ ID NO: 6893 - RNA, 20 nt, synthetic construct
  misc_feature 1..20: note = source = /note="Description of Artificial Sequence: Synthetic oligonucleotide"
  source 1..20: mol_type = other RNA
cactgttgtaattgtgattt

SEQ ID NO: 6894 - RNA, 20 nt, synthetic construct
  misc_feature 1..20: note = source = /note="Description of Artificial Sequence: Synthetic oligonucleotide"
  source 1..20: mol_type = other RNA
acaaatgacacactaggact

SEQ ID NO: 6895 - RNA, 20 nt, synthetic construct
  misc_feature 1..20: note = source = /note="Description of Artificial Sequence: Synthetic oligonucleotide"
  source 1..20: mol_type = other RNA
gtgaatatgaggtggccata

SEQ ID NO: 6896 - RNA, 20 nt, synthetic construct
  misc_feature 1..20: note = source = /note="Description of Artificial Sequence: Synthetic oligonucleotide"
  source 1..20: mol_type = other RNA
tatgcagggtgaatatgagg

SEQ ID NO: 6897 - RNA, 20 nt, synthetic construct
  misc_feature 1..20: note = source = /note="Description of Artificial Sequence: Synthetic oligonucleotide"
  source 1..20: mol_type = other RNA
ttatatgcagggtgaatatg

SEQ ID NO: 6898 - RNA, 20 nt, synthetic construct
  misc_feature 1..20: note = source = /note="Description of Artificial Sequence: Synthetic oligonucleotide"
  source 1..20: mol_type = other RNA
ttggcatactgttatatgca

SEQ ID NO: 6899 - RNA, 20 nt, synthetic construct
  misc_feature 1..20: note = source = /note="Description of Artificial Sequence: Synthetic oligonucleotide"
  source 1..20: mol_type = other RNA
attggcatactgttatatgc

SEQ ID NO: 6900 - RNA, 20 nt, synthetic construct
  misc_feature 1..20: note = source = /note="Description of Artificial Sequence: Synthetic oligonucleotide"
  source 1..20: mol_type = other RNA
ttcacgcctcattcctacat

SEQ ID NO: 6901 - RNA, 20 nt, synthetic construct
  misc_feature 1..20: note = source = /note="Description of Artificial Sequence: Synthetic oligonucleotide"
  source 1..20: mol_type = other RNA
agctaccaaaggaataatca

SEQ ID NO: 6902 - RNA, 20 nt, synthetic construct
  misc_feature 1..20: note = source = /note="Description of Artificial Sequence: Synthetic oligonucleotide"
  source 1..20: mol_type = other RNA
atttcccttgaagctaccaa

SEQ ID NO: 6903 - RNA, 20 nt, synthetic construct
  misc_feature 1..20: note = source = /note="Description of Artificial Sequence: Synthetic oligonucleotide"
  source 1..20: mol_type = other RNA
gacagataaagtgctgacat

SEQ ID NO: 6904 - RNA, 20 nt, synthetic construct
  misc_feature 1..20: note = source = /note="Description of Artificial Sequence: Synthetic oligonucleotide"
  source 1..20: mol_type = other RNA
ggacagataaagtgctgaca

SEQ ID NO: 6905 - RNA, 20 nt, synthetic construct
  misc_feature 1..20: note = source = /note="Description of Artificial Sequence: Synthetic oligonucleotide"
  source 1..20: mol_type = other RNA
tttggaatttctcatgtttc

SEQ ID NO: 6906 - RNA, 20 nt, synthetic construct
  misc_feature 1..20: note = source = /note="Description of Artificial Sequence: Synthetic oligonucleotide"
  source 1..20: mol_type = other RNA
aactgcatggcttgaacatt

SEQ ID NO: 6907 - RNA, 20 nt, synthetic construct
  misc_feature 1..20: note = source = /note="Description of Artificial Sequence: Synthetic oligonucleotide"
  source 1..20: mol_type = other RNA
ctgactagataaaaactgca

SEQ ID NO: 6908 - RNA, 20 nt, synthetic construct
  misc_feature 1..20: note = source = /note="Description of Artificial Sequence: Synthetic oligonucleotide"
  source 1..20: mol_type = other RNA
cattacaactatgggtaacc

SEQ ID NO: 6909 - RNA, 20 nt, synthetic construct
  misc_feature 1..20: note = source = /note="Description of Artificial Sequence: Synthetic oligonucleotide"
  source 1..20: mol_type = other RNA
gaggtattcattacaactat

SEQ ID NO: 6910 - RNA, 20 nt, synthetic construct
  misc_feature 1..20: note = source = /note="Description of Artificial Sequence: Synthetic oligonucleotide"
  source 1..20: mol_type = other RNA
ggaggtattcattacaacta

SEQ ID NO: 6911 - RNA, 20 nt, synthetic construct
  misc_feature 1..20: note = source = /note="Description of Artificial Sequence: Synthetic oligonucleotide"
  source 1..20: mol_type = other RNA
acattaagaagataaagagg

SEQ ID NO: 6912 - RNA, 20 nt, synthetic construct
  misc_feature 1..20: note = source = /note="Description of Artificial Sequence: Synthetic oligonucleotide"
  source 1..20: mol_type = other RNA
agaacattaagaagataaag

SEQ ID NO: 6913 - RNA, 20 nt, synthetic construct
  misc_feature 1..20: note = source = /note="Description of Artificial Sequence: Synthetic oligonucleotide"
  source 1..20: mol_type = other RNA
agtaatctttatagatcatt

SEQ ID NO: 6914 - RNA, 20 nt, synthetic construct
  misc_feature 1..20: note = source = /note="Description of Artificial Sequence: Synthetic oligonucleotide"
  source 1..20: mol_type = other RNA
ctgctggacctcaatctgaa

SEQ ID NO: 6915 - RNA, 20 nt, synthetic construct
  misc_feature 1..20: note = source = /note="Description of Artificial Sequence: Synthetic oligonucleotide"
  source 1..20: mol_type = other RNA
gtagtgttctgaaagtctgc

SEQ ID NO: 6916 - RNA, 20 nt, synthetic construct
  misc_feature 1..20: note = source = /note="Description of Artificial Sequence: Synthetic oligonucleotide"
  source 1..20: mol_type = other RNA
agcttattattttattagtt

SEQ ID NO: 6917 - RNA, 20 nt, synthetic construct
  misc_feature 1..20: note = source = /note="Description of Artificial Sequence: Synthetic oligonucleotide"
  source 1..20: mol_type = other RNA
gagcttattattttattagt

SEQ ID NO: 6918 - RNA, 20 nt, synthetic construct
  misc_feature 1..20: note = source = /note="Description of Artificial Sequence: Synthetic oligonucleotide"
  source 1..20: mol_type = other RNA
ccacaaataaaggcaaatac

SEQ ID NO: 6919 - RNA, 20 nt, synthetic construct
  misc_feature 1..20: note = source = /note="Description of Artificial Sequence: Synthetic oligonucleotide"
  source 1..20: mol_type = other RNA
gtgtgtatacccacaaataa

SEQ ID NO: 6920 - RNA, 20 nt, synthetic construct
  misc_feature 1..20: note = source = /note="Description of Artificial Sequence: Synthetic oligonucleotide"
  source 1..20: mol_type = other RNA
aatgattttactctagttta

SEQ ID NO: 6921 - RNA, 20 nt, synthetic construct
  misc_feature 1..20: note = source = /note="Description of Artificial Sequence: Synthetic oligonucleotide"
  source 1..20: mol_type = other RNA
atacacaatttgaaaatttt

SEQ ID NO: 6922 - RNA, 20 nt, synthetic construct
  misc_feature 1..20: note = source = /note="Description of Artificial Sequence: Synthetic oligonucleotide"
  source 1..20: mol_type = other RNA
catacacaatttgaaaattt

SEQ ID NO: 6923 - RNA, 20 nt, synthetic construct
  misc_feature 1..20: note = source = /note="Description of Artificial Sequence: Synthetic oligonucleotide"
  source 1..20: mol_type = other RNA
taatttcatttaaaccagaa

SEQ ID NO: 6924 - RNA, 20 nt, synthetic construct
  misc_feature 1..20: note = source = /note="Description of Artificial Sequence: Synthetic oligonucleotide"
  source 1..20: mol_type = other RNA
gcactcgatggcgtggaccg

SEQ ID NO: 6925 - RNA, 20 nt, synthetic construct
  misc_feature 1..20: note = source = /note="Description of Artificial Sequence: Synthetic oligonucleotide"
  source 1..20: mol_type = other RNA
gtccgcactcgatggcgtgg

SEQ ID NO: 6926 - RNA, 20 nt, synthetic construct
  misc_feature 1..20: note = source = /note="Description of Artificial Sequence: Synthetic oligonucleotide"
  source 1..20: mol_type = other RNA
agggtttcacgaccctaatg

SEQ ID NO: 6927 - RNA, 20 nt, synthetic construct
  misc_feature 1..20: note = source = /note="Description of Artificial Sequence: Synthetic oligonucleotide"
  source 1..20: mol_type = other RNA
ggagtcggagggtttcacga

SEQ ID NO: 6928 - RNA, 20 nt, synthetic construct
  misc_feature 1..20: note = source = /note="Description of Artificial Sequence: Synthetic oligonucleotide"
  source 1..20: mol_type = other RNA
cggagtcggagggtttcacg

SEQ ID NO: 6929 - RNA, 20 nt, synthetic construct
  misc_feature 1..20: note = source = /note="Description of Artificial Sequence: Synthetic oligonucleotide"
  source 1..20: mol_type = other RNA
ccaaaacttgaggactgaag

SEQ ID NO: 6930 - RNA, 20 nt, synthetic construct
  misc_feature 1..20: note = source = /note="Description of Artificial Sequence: Synthetic oligonucleotide"
  source 1..20: mol_type = other RNA
aaagtggtacaaccggtccg

SEQ ID NO: 6931 - RNA, 20 nt, synthetic construct
  misc_feature 1..20: note = source = /note="Description of Artificial Sequence: Synthetic oligonucleotide"
  source 1..20: mol_type = other RNA
tcccaaagtggtacaaccgg

SEQ ID NO: 6932 - RNA, 20 nt, synthetic construct
  misc_feature 1..20: note = source = /note="Description of Artificial Sequence: Synthetic oligonucleotide"
  source 1..20: mol_type = other RNA
ctctgtcccaaagtggtaca

SEQ ID NO: 6933 - RNA, 20 nt, synthetic construct
  misc_feature 1..20: note = source = /note="Description of Artificial Sequence: Synthetic oligonucleotide"
  source 1..20: mol_type = other RNA
aacataaaaatcatctctgt

SEQ ID NO: 6934 - RNA, 20 nt, synthetic construct
  misc_feature 1..20: note = source = /note="Description of Artificial Sequence: Synthetic oligonucleotide"
  source 1..20: mol_type = other RNA
aaacataaaaatcatctctg

SEQ ID NO: 6935 - RNA, 20 nt, synthetic construct
  misc_feature 1..20: note = source = /note="Description of Artificial Sequence: Synthetic oligonucleotide"
  source 1..20: mol_type = other RNA
gtccgtgcacggtggtacgg

SEQ ID NO: 6936 - RNA, 20 nt, synthetic construct
  misc_feature 1..20: note = source = /note="Description of Artificial Sequence: Synthetic oligonucleotide"
  source 1..20: mol_type = other RNA
taggttcatagaccctgatg

SEQ ID NO: 6937 - RNA, 20 nt, synthetic construct
  misc_feature 1..20: note = source = /note="Description of Artificial Sequence: Synthetic oligonucleotide"
  source 1..20: mol_type = other RNA
ggagtcggtaggttcataga

SEQ ID NO: 6938 - RNA, 20 nt, synthetic construct
  misc_feature 1..20: note = source = /note="Description of Artificial Sequence: Synthetic oligonucleotide"
  source 1..20: mol_type = other RNA
cggagtcggtaggttcatag

SEQ ID NO: 6939 - RNA, 20 nt, synthetic construct
  misc_feature 1..20: note = source = /note="Description of Artificial Sequence: Synthetic oligonucleotide"
  source 1..20: mol_type = other RNA
gtgacgttggaggcggagga

SEQ ID NO: 6940 - RNA, 20 nt, synthetic construct
  misc_feature 1..20: note = source = /note="Description of Artificial Sequence: Synthetic oligonucleotide"
  source 1..20: mol_type = other RNA
agtgacgttggaggcggagg

SEQ ID NO: 6941 - RNA, 20 nt, synthetic construct
  misc_feature 1..20: note = source = /note="Description of Artificial Sequence: Synthetic oligonucleotide"
  source 1..20: mol_type = other RNA
agctggtccgatctcacgtc

SEQ ID NO: 6942 - RNA, 20 nt, synthetic construct
  misc_feature 1..20: note = source = /note="Description of Artificial Sequence: Synthetic oligonucleotide"
  source 1..20: mol_type = other RNA
tctaagagtgagacagctgg

SEQ ID NO: 6943 - RNA, 20 nt, synthetic construct
  misc_feature 1..20: note = source = /note="Description of Artificial Sequence: Synthetic oligonucleotide"
  source 1..20: mol_type = other RNA
ggtgggtgggtgggggaatg

SEQ ID NO: 6944 - RNA, 20 nt, synthetic construct
  misc_feature 1..20: note = source = /note="Description of Artificial Sequence: Synthetic oligonucleotide"
  source 1..20: mol_type = other RNA
tggtgggtgggtgggggaat

SEQ ID NO: 6945 - RNA, 20 nt, synthetic construct
  misc_feature 1..20: note = source = /note="Description of Artificial Sequence: Synthetic oligonucleotide"
  source 1..20: mol_type = other RNA
ttggtgggtgggtgggggaa

SEQ ID NO: 6946 - RNA, 20 nt, synthetic construct
  misc_feature 1..20: note = source = /note="Description of Artificial Sequence: Synthetic oligonucleotide"
  source 1..20: mol_type = other RNA
gtcttttggtgggtgggtgg

SEQ ID NO: 6947 - RNA, 20 nt, synthetic construct
  misc_feature 1..20: note = source = /note="Description of Artificial Sequence: Synthetic oligonucleotide"
  source 1..20: mol_type = other RNA
agtcttttggtgggtgggtg

SEQ ID NO: 6948 - RNA, 20 nt, synthetic construct
  misc_feature 1..20: note = source = /note="Description of Artificial Sequence: Synthetic oligonucleotide"
  source 1..20: mol_type = other RNA
gagtcttttggtgggtgggt

SEQ ID NO: 6949 - RNA, 20 nt, synthetic construct
  misc_feature 1..20: note = source = /note="Description of Artificial Sequence: Synthetic oligonucleotide"
  source 1..20: mol_type = other RNA
ggagtcttttggtgggtggg

SEQ ID NO: 6950 - RNA, 20 nt, synthetic construct
  misc_feature 1..20: note = source = /note="Description of Artificial Sequence: Synthetic oligonucleotide"
  source 1..20: mol_type = other RNA
aatggagtcttttggtgggt

SEQ ID NO: 6951 - RNA, 20 nt, synthetic construct
  misc_feature 1..20: note = source = /note="Description of Artificial Sequence: Synthetic oligonucleotide"
  source 1..20: mol_type = other RNA
caatggagtcttttggtggg

SEQ ID NO: 6952 - RNA, 20 nt, synthetic construct
  misc_feature 1..20: note = source = /note="Description of Artificial Sequence: Synthetic oligonucleotide"
  source 1..20: mol_type = other RNA
ctccaatggagtcttttggt

SEQ ID NO: 6953 - RNA, 20 nt, synthetic construct
  misc_feature 1..20: note = source = /note="Description of Artificial Sequence: Synthetic oligonucleotide"
  source 1..20: mol_type = other RNA
actccaatggagtcttttgg

SEQ ID NO: 6954 - RNA, 20 nt, synthetic construct
  misc_feature 1..20: note = source = /note="Description of Artificial Sequence: Synthetic oligonucleotide"
  source 1..20: mol_type = other RNA
aaaactccaatggagtcttt

SEQ ID NO: 6955 - RNA, 20 nt, synthetic construct
  misc_feature 1..20: note = source = /note="Description of Artificial Sequence: Synthetic oligonucleotide"
  source 1..20: mol_type = other RNA
tttgtaaaataaaactccaa

SEQ ID NO: 6956 - RNA, 20 nt, synthetic construct
  misc_feature 1..20: note = source = /note="Description of Artificial Sequence: Synthetic oligonucleotide"
  source 1..20: mol_type = other RNA
ctatgtcagaaaaagaattg

SEQ ID NO: 6957 - RNA, 20 nt, synthetic construct
  misc_feature 1..20: note = source = /note="Description of Artificial Sequence: Synthetic oligonucleotide"
  source 1..20: mol_type = other RNA
ctgacgtgtcaaacttcagc

SEQ ID NO: 6958 - RNA, 20 nt, synthetic construct
  misc_feature 1..20: note = source = /note="Description of Artificial Sequence: Synthetic oligonucleotide"
  source 1..20: mol_type = other RNA
aaactcaatttgattaaaat

SEQ ID NO: 6959 - RNA, 20 nt, synthetic construct
  misc_feature 1..20: note = source = /note="Description of Artificial Sequence: Synthetic oligonucleotide"
  source 1..20: mol_type = other RNA
ttagtgtgtcattttgaata

SEQ ID NO: 6960 - RNA, 20 nt, synthetic construct
  misc_feature 1..20: note = source = /note="Description of Artificial Sequence: Synthetic oligonucleotide"
  source 1..20: mol_type = other RNA
caatgagaagaatacagatg

SEQ ID NO: 6961 - RNA, 20 nt, synthetic construct
  misc_feature 1..20: note = source = /note="Description of Artificial Sequence: Synthetic oligonucleotide"
  source 1..20: mol_type = other RNA
aagtccatttggtcaagcat

SEQ ID NO: 6962 - RNA, 20 nt, synthetic construct
  misc_feature 1..20: note = source = /note="Description of Artificial Sequence: Synthetic oligonucleotide"
  source 1..20: mol_type = other RNA
aaaatagcaggaagtccatt

SEQ ID NO: 6963 - RNA, 20 nt, synthetic construct
  misc_feature 1..20: note = source = /note="Description of Artificial Sequence: Synthetic oligonucleotide"
  source 1..20: mol_type = other RNA
gaaaaatatcttaaaatagc

SEQ ID NO: 6964 - RNA, 20 nt, synthetic construct
  misc_feature 1..20: note = source = /note="Description of Artificial Sequence: Synthetic oligonucleotide"
  source 1..20: mol_type = other RNA
agaagaacatcctaggtaaa

SEQ ID NO: 6965 - RNA, 20 nt, synthetic construct
  misc_feature 1..20: note = source = /note="Description of Artificial Sequence: Synthetic oligonucleotide"
  source 1..20: mol_type = other RNA
aagaagaacatcctaggtaa

SEQ ID NO: 6966 - RNA, 20 nt, synthetic construct
  misc_feature 1..20: note = source = /note="Description of Artificial Sequence: Synthetic oligonucleotide"
  source 1..20: mol_type = other RNA
cagtgaaagaagaacatcct

SEQ ID NO: 6967 - RNA, 20 nt, synthetic construct
  misc_feature 1..20: note = source = /note="Description of Artificial Sequence: Synthetic oligonucleotide"
  source 1..20: mol_type = other RNA
ggcttttggtagtgtgcttt

SEQ ID NO: 6968 - RNA, 20 nt, synthetic construct
  misc_feature 1..20: note = source = /note="Description of Artificial Sequence: Synthetic oligonucleotide"
  source 1..20: mol_type = other RNA
tcatccaaatgaagggcttt

SEQ ID NO: 6969 - RNA, 20 nt, synthetic construct
  misc_feature 1..20: note = source = /note="Description of Artificial Sequence: Synthetic oligonucleotide"
  source 1..20: mol_type = other RNA
aggtgggtcatccaaatgaa

SEQ ID NO: 6970 - RNA, 20 nt, synthetic construct
  misc_feature 1..20: note = source = /note="Description of Artificial Sequence: Synthetic oligonucleotide"
  source 1..20: mol_type = other RNA
aaggtgggtcatccaaatga

SEQ ID NO: 6971 - RNA, 20 nt, synthetic construct
  misc_feature 1..20: note = source = /note="Description of Artificial Sequence: Synthetic oligonucleotide"
  source 1..20: mol_type = other RNA
atggagactcataggaaggt

SEQ ID NO: 6972 - RNA, 20 nt, synthetic construct
  misc_feature 1..20: note = source = /note="Description of Artificial Sequence: Synthetic oligonucleotide"
  source 1..20: mol_type = other RNA
tatggagactcataggaagg

SEQ ID NO: 6973 - RNA, 20 nt, synthetic construct
  misc_feature 1..20: note = source = /note="Description of Artificial Sequence: Synthetic oligonucleotide"
  source 1..20: mol_type = other RNA
aactatggagactcatagga

SEQ ID NO: 6974 - RNA, 20 nt, synthetic construct
  misc_feature 1..20: note = source = /note="Description of Artificial Sequence: Synthetic oligonucleotide"
  source 1..20: mol_type = other RNA
atgcaactatggagactcat

SEQ ID NO: 6975 - RNA, 20 nt, synthetic construct
  misc_feature 1..20: note = source = /note="Description of Artificial Sequence: Synthetic oligonucleotide"
  source 1..20: mol_type = other RNA
tgccatcagacatgcaacta

SEQ ID NO: 6976 - RNA, 20 nt, synthetic construct
  misc_feature 1..20: note = source = /note="Description of Artificial Sequence: Synthetic oligonucleotide"
  source 1..20: mol_type = other RNA
atgggaaacagaatgacaat

SEQ ID NO: 6977 - RNA, 20 nt, synthetic construct
  misc_feature 1..20: note = source = /note="Description of Artificial Sequence: Synthetic oligonucleotide"
  source 1..20: mol_type = other RNA
agtactgtactaggtgccat

SEQ ID NO: 6978 - RNA, 20 nt, synthetic construct
  misc_feature 1..20: note = source = /note="Description of Artificial Sequence: Synthetic oligonucleotide"
  source 1..20: mol_type = other RNA
gagtactgtactaggtgcca

SEQ ID NO: 6979 - RNA, 20 nt, synthetic construct
  misc_feature 1..20: note = source = /note="Description of Artificial Sequence: Synthetic oligonucleotide"
  source 1..20: mol_type = other RNA
tgtgagcagagtactgtact

SEQ ID NO: 6980 - RNA, 20 nt, synthetic construct
  misc_feature 1..20: note = source = /note="Description of Artificial Sequence: Synthetic oligonucleotide"
  source 1..20: mol_type = other RNA
tgaggtgggacccgctgtct

SEQ ID NO: 6981 - RNA, 20 nt, synthetic construct
  misc_feature 1..20: note = source = /note="Description of Artificial Sequence: Synthetic oligonucleotide"
  source 1..20: mol_type = other RNA
atgaggtgggacccgctgtc

SEQ ID NO: 6982 - RNA, 20 nt, synthetic construct
  misc_feature 1..20: note = source = /note="Description of Artificial Sequence: Synthetic oligonucleotide"
  source 1..20: mol_type = other RNA
cgtggtgacatgaggtggga

SEQ ID NO: 6983 - RNA, 20 nt, synthetic construct
  misc_feature 1..20: note = source = /note="Description of Artificial Sequence: Synthetic oligonucleotide"
  source 1..20: mol_type = other RNA
acgtggtgacatgaggtggg

SEQ ID NO: 6984 - RNA, 20 nt, synthetic construct
  misc_feature 1..20: note = source = /note="Description of Artificial Sequence: Synthetic oligonucleotide"
  source 1..20: mol_type = other RNA
agtgaacttgggtcgtcgtc

SEQ ID NO: 6985 - RNA, 20 nt, synthetic construct
  misc_feature 1..20: note = source = /note="Description of Artificial Sequence: Synthetic oligonucleotide"
  source 1..20: mol_type = other RNA
cgatgagccctcagactctg

SEQ ID NO: 6986 - RNA, 20 nt, synthetic construct
  misc_feature 1..20: note = source = /note="Description of Artificial Sequence: Synthetic oligonucleotide"
  source 1..20: mol_type = other RNA
accatatcagggtcgatgag

SEQ ID NO: 6987 - RNA, 20 nt, synthetic construct
  misc_feature 1..20: note = source = /note="Description of Artificial Sequence: Synthetic oligonucleotide"
  source 1..20: mol_type = other RNA
caccatatcagggtcgatga

SEQ ID NO: 6988 - RNA, 20 nt, synthetic construct
  misc_feature 1..20: note = source = /note="Description of Artificial Sequence: Synthetic oligonucleotide"
  source 1..20: mol_type = other RNA
tcggtccgtaccaccgtacc

SEQ ID NO: 6989 - RNA, 20 nt, synthetic construct
  misc_feature 1..20: note = source = /note="Description of Artificial Sequence: Synthetic oligonucleotide"
  source 1..20: mol_type = other RNA
caatcggtccgtaccaccgt

SEQ ID NO: 6990 - RNA, 20 nt, synthetic construct
  misc_feature 1..20: note = source = /note="Description of Artificial Sequence: Synthetic oligonucleotide"
  source 1..20: mol_type = other RNA
attttcaatcggtccgtacc

SEQ ID NO: 6991 - RNA, 20 nt, synthetic construct
  misc_feature 1..20: note = source = /note="Description of Artificial Sequence: Synthetic oligonucleotide"
  source 1..20: mol_type = other RNA
atgattttcaatcggtccgt

SEQ ID NO: 6992 - RNA, 20 nt, synthetic construct
  misc_feature 1..20: note = source = /note="Description of Artificial Sequence: Synthetic oligonucleotide"
  source 1..20: mol_type = other RNA
caaagatgattttcaatcgg

SEQ ID NO: 6993 - RNA, 20 nt, synthetic construct
  misc_feature 1..20: note = source = /note="Description of Artificial Sequence: Synthetic oligonucleotide"
  source 1..20: mol_type = other RNA
cctctggtcggaccggttgt

SEQ ID NO: 6994 - RNA, 20 nt, synthetic construct
  misc_feature 1..20: note = source = /note="Description of Artificial Sequence: Synthetic oligonucleotide"
  source 1..20: mol_type = other RNA
ggtcctcaacctctggtcgg

SEQ ID NO: 6995 - RNA, 20 nt, synthetic construct
  misc_feature 1..20: note = source = /note="Description of Artificial Sequence: Synthetic oligonucleotide"
  source 1..20: mol_type = other RNA
ctagtgaactccggtcctca

SEQ ID NO: 6996 - RNA, 20 nt, synthetic construct
  misc_feature 1..20: note = source = /note="Description of Artificial Sequence: Synthetic oligonucleotide"
  source 1..20: mol_type = other RNA
gtccacctagtgaactccgg

SEQ ID NO: 6997 - RNA, 20 nt, synthetic construct
  misc_feature 1..20: note = source = /note="Description of Artificial Sequence: Synthetic oligonucleotide"
  source 1..20: mol_type = other RNA
gttccgtccacctagtgaac

SEQ ID NO: 6998 - RNA, 20 nt, synthetic construct
  misc_feature 1..20: note = source = /note="Description of Artificial Sequence: Synthetic oligonucleotide"
  source 1..20: mol_type = other RNA
gaaatactccggttccgtcc

SEQ ID NO: 6999 - RNA, 20 nt, synthetic construct
  misc_feature 1..20: note = source = /note="Description of Artificial Sequence: Synthetic oligonucleotide"
  source 1..20: mol_type = other RNA
cgtgaaatactccggttccg

SEQ ID NO: 7000 - RNA, 20 nt, synthetic construct
  misc_feature 1..20: note = source = /note="Description of Artificial Sequence: Synthetic oligonucleotide"
  source 1..20: mol_type = other RNA
ggatcgtgaaatactccggt

SEQ ID NO: 7001 - RNA, 20 nt, synthetic construct
  misc_feature 1..20: note = source = /note="Description of Artificial Sequence: Synthetic oligonucleotide"
  source 1..20: mol_type = other RNA
ttttgaggatcgtgaaatac

SEQ ID NO: 7002 - RNA, 20 nt, synthetic construct
  misc_feature 1..20: note = source = /note="Description of Artificial Sequence: Synthetic oligonucleotide"
  source 1..20: mol_type = other RNA
atatatagcattgtactgta

SEQ ID NO: 7003 - RNA, 20 nt, synthetic construct
  misc_feature 1..20: note = source = /note="Description of Artificial Sequence: Synthetic oligonucleotide"
  source 1..20: mol_type = other RNA
ctcgatacttggtctttggt

SEQ ID NO: 7004 - RNA, 20 nt, synthetic construct
  misc_feature 1..20: note = source = /note="Description of Artificial Sequence: Synthetic oligonucleotide"
  source 1..20: mol_type = other RNA
ttctgacatttttccctata

SEQ ID NO: 7005 - RNA, 20 nt, synthetic construct
  misc_feature 1..20: note = source = /note="Description of Artificial Sequence: Synthetic oligonucleotide"
  source 1..20: mol_type = other RNA
gattgttttctgacattttt

SEQ ID NO: 7006 - RNA, 20 nt, synthetic construct
  misc_feature 1..20: note = source = /note="Description of Artificial Sequence: Synthetic oligonucleotide"
  source 1..20: mol_type = other RNA
agattgttttctgacatttt

SEQ ID NO: 7007 - RNA, 20 nt, synthetic construct
  misc_feature 1..20: note = source = /note="Description of Artificial Sequence: Synthetic oligonucleotide"
  source 1..20: mol_type = other RNA
caaaagattccggacggggc

SEQ ID NO: 7008 - RNA, 20 nt, synthetic construct
  misc_feature 1..20: note = source = /note="Description of Artificial Sequence: Synthetic oligonucleotide"
  source 1..20: mol_type = other RNA
tcctctctaagacaaaagat

SEQ ID NO: 7009 - RNA, 20 nt, synthetic construct
  misc_feature 1..20: note = source = /note="Description of Artificial Sequence: Synthetic oligonucleotide"
  source 1..20: mol_type = other RNA
ccctgttcactttccttccg

SEQ ID NO: 7010 - RNA, 20 nt, synthetic construct
  misc_feature 1..20: note = source = /note="Description of Artificial Sequence: Synthetic oligonucleotide"
  source 1..20: mol_type = other RNA
agccccctgttcactttcct

SEQ ID NO: 7011 - RNA, 20 nt, synthetic construct
  misc_feature 1..20: note = source = /note="Description of Artificial Sequence: Synthetic oligonucleotide"
  source 1..20: mol_type = other RNA
agggagccccctgttcactt

SEQ ID NO: 7012 - RNA, 20 nt, synthetic construct
  misc_feature 1..20: note = source = /note="Description of Artificial Sequence: Synthetic oligonucleotide"
  source 1..20: mol_type = other RNA
ttttttttttagagggagcc

SEQ ID NO: 7013 - RNA, 20 nt, synthetic construct
  misc_feature 1..20: note = source = /note="Description of Artificial Sequence: Synthetic oligonucleotide"
  source 1..20: mol_type = other RNA
tttttttttttagagggagc

SEQ ID NO: 7014 - RNA, 20 nt, synthetic construct
  misc_feature 1..20: note = source = /note="Description of Artificial Sequence: Synthetic oligonucleotide"
  source 1..20: mol_type = other RNA
ttttttttttttagagggag

SEQ ID NO: 7015 - RNA, 20 nt, synthetic construct
  misc_feature 1..20: note = source = /note="Description of Artificial Sequence: Synthetic oligonucleotide"
  source 1..20: mol_type = other RNA
tttttttttttttagaggga

SEQ ID NO: 7016 - RNA, 20 nt, synthetic construct
  misc_feature 1..20: note = source = /note="Description of Artificial Sequence: Synthetic oligonucleotide"
  source 1..20: mol_type = other RNA
tgaggtcggacccactgtgt

SEQ ID NO: 7017 - RNA, 20 nt, synthetic construct
  misc_feature 1..20: note = source = /note="Description of Artificial Sequence: Synthetic oligonucleotide"
  source 1..20: mol_type = other RNA
gtgaggtcggacccactgtg

SEQ ID NO: 7018 - RNA, 20 nt, synthetic construct
  misc_feature 1..20: note = source = /note="Description of Artificial Sequence: Synthetic oligonucleotide"
  source 1..20: mol_type = other RNA
tgtggtgacgtgaggtcgga

SEQ ID NO: 7019 - RNA, 20 nt, synthetic construct
  misc_feature 1..20: note = source = /note="Description of Artificial Sequence: Synthetic oligonucleotide"
  source 1..20: mol_type = other RNA
gtgtggtgacgtgaggtcgg

SEQ ID NO: 7020 - RNA, 20 nt, synthetic construct
  misc_feature 1..20: note = source = /note="Description of Artificial Sequence: Synthetic oligonucleotide"
  source 1..20: mol_type = other RNA
ttggatcctccgactccgac

SEQ ID NO: 7021 - RNA, 20 nt, synthetic construct
  misc_feature 1..20: note = source = /note="Description of Artificial Sequence: Synthetic oligonucleotide"
  source 1..20: mol_type = other RNA
acgaacttggatcctccgac

SEQ ID NO: 7022 - RNA, 20 nt, synthetic construct
  misc_feature 1..20: note = source = /note="Description of Artificial Sequence: Synthetic oligonucleotide"
  source 1..20: mol_type = other RNA
ctcctaacgaacttggatcc

SEQ ID NO: 7023 - RNA, 20 nt, synthetic construct
  misc_feature 1..20: note = source = /note="Description of Artificial Sequence: Synthetic oligonucleotide"
  source 1..20: mol_type = other RNA
accctcctaacgaacttgga

SEQ ID NO: 7024 - RNA, 20 nt, synthetic construct
  misc_feature 1..20: note = source = /note="Description of Artificial Sequence: Synthetic oligonucleotide"
  source 1..20: mol_type = other RNA
tgaaccctccgactctaccc

SEQ ID NO: 7025 - RNA, 20 nt, synthetic construct
  misc_feature 1..20: note = source = /note="Description of Artificial Sequence: Synthetic oligonucleotide"
  source 1..20: mol_type = other RNA
ccatgaaccctccgactcta

SEQ ID NO: 7026 - RNA, 20 nt, synthetic construct
  misc_feature 1..20: note = source = /note="Description of Artificial Sequence: Synthetic oligonucleotide"
  source 1..20: mol_type = other RNA
tccatgaaccctccgactct

SEQ ID NO: 7027 - RNA, 20 nt, synthetic construct
  misc_feature 1..20: note = source = /note="Description of Artificial Sequence: Synthetic oligonucleotide"
  source 1..20: mol_type = other RNA
acatcagggtccatgaaccc

SEQ ID NO: 7028 - RNA, 20 nt, synthetic construct
  misc_feature 1..20: note = source = /note="Description of Artificial Sequence: Synthetic oligonucleotide"
  source 1..20: mol_type = other RNA
cggacatcagggtccatgaa

SEQ ID NO: 7029 - RNA, 20 nt, synthetic construct
  misc_feature 1..20: note = source = /note="Description of Artificial Sequence: Synthetic oligonucleotide"
  source 1..20: mol_type = other RNA
acggacatcagggtccatga

SEQ ID NO: 7030 - RNA, 20 nt, synthetic construct
  misc_feature 1..20: note = source = /note="Description of Artificial Sequence: Synthetic oligonucleotide"
  source 1..20: mol_type = other RNA
accgtacacggacatcaggg

SEQ ID NO: 7031 - RNA, 20 nt, synthetic construct
  misc_feature 1..20: note = source = /note="Description of Artificial Sequence: Synthetic oligonucleotide"
  source 1..20: mol_type = other RNA
ttttttttacggtccacacc

SEQ ID NO: 7032 - RNA, 20 nt, synthetic construct
  misc_feature 1..20: note = source = /note="Description of Artificial Sequence: Synthetic oligonucleotide"
  source 1..20: mol_type = other RNA
tttttttttttacggtccac

SEQ ID NO: 7033 - RNA, 20 nt, synthetic construct
  misc_feature 1..20: note = source = /note="Description of Artificial Sequence: Synthetic oligonucleotide"
  source 1..20: mol_type = other RNA
ttttttttttttttttacgg

SEQ ID NO: 7034 - RNA, 20 nt, synthetic construct
  misc_feature 1..20: note = source = /note="Description of Artificial Sequence: Synthetic oligonucleotide"
  source 1..20: mol_type = other RNA
cctccggtctgacccgttgt

SEQ ID NO: 7035 - RNA, 20 nt, synthetic construct
  misc_feature 1..20: note = source = /note="Description of Artificial Sequence: Synthetic oligonucleotide"
  source 1..20: mol_type = other RNA
gtcctcgacctccggtctga

SEQ ID NO: 7036 - RNA, 20 nt, synthetic construct
  misc_feature 1..20: note = source = /note="Description of Artificial Sequence: Synthetic oligonucleotide"
  source 1..20: mol_type = other RNA
ggtcctcgacctccggtctg

SEQ ID NO: 7037 - RNA, 20 nt, synthetic construct
  misc_feature 1..20: note = source = /note="Description of Artificial Sequence: Synthetic oligonucleotide"
  source 1..20: mol_type = other RNA
gtgaactcgggtcctcgacc

SEQ ID NO: 7038 - RNA, 20 nt, synthetic construct
  misc_feature 1..20: note = source = /note="Description of Artificial Sequence: Synthetic oligonucleotide"
  source 1..20: mol_type = other RNA
ctagtgaactcgggtcctcg

SEQ ID NO: 7039 - RNA, 20 nt, synthetic construct
  misc_feature 1..20: note = source = /note="Description of Artificial Sequence: Synthetic oligonucleotide"
  source 1..20: mol_type = other RNA
acccacctagtgaactcggg

SEQ ID NO: 7040 - RNA, 20 nt, synthetic construct
  misc_feature 1..20: note = source = /note="Description of Artificial Sequence: Synthetic oligonucleotide"
  source 1..20: mol_type = other RNA
caccaaactcggttccaccc

SEQ ID NO: 7041 - RNA, 20 nt, synthetic construct
  misc_feature 1..20: note = source = /note="Description of Artificial Sequence: Synthetic oligonucleotide"
  source 1..20: mol_type = other RNA
caccaccaaactcggttcca

SEQ ID NO: 7042 - RNA, 20 nt, synthetic construct
  misc_feature 1..20: note = source = /note="Description of Artificial Sequence: Synthetic oligonucleotide"
  source 1..20: mol_type = other RNA
acaccaccaaactcggttcc

SEQ ID NO: 7043 - RNA, 20 nt, synthetic construct
  misc_feature 1..20: note = source = /note="Description of Artificial Sequence: Synthetic oligonucleotide"
  source 1..20: mol_type = other RNA
cccacaccaccaaactcggt

SEQ ID NO: 7044 - RNA, 20 nt, synthetic construct
  misc_feature 1..20: note = source = /note="Description of Artificial Sequence: Synthetic oligonucleotide"
  source 1..20: mol_type = other RNA
agggagtcccaacccacacc

SEQ ID NO: 7045 - RNA, 20 nt, synthetic construct
  misc_feature 1..20: note = source = /note="Description of Artificial Sequence: Synthetic oligonucleotide"
  source 1..20: mol_type = other RNA
tagagggagtcccaacccac

SEQ ID NO: 7046 - RNA, 20 nt, synthetic construct
  misc_feature 1..20: note = source = /note="Description of Artificial Sequence: Synthetic oligonucleotide"
  source 1..20: mol_type = other RNA
aatcttagagggagtcccaa

SEQ ID NO: 7047 - RNA, 20 nt, synthetic construct
  misc_feature 1..20: note = source = /note="Description of Artificial Sequence: Synthetic oligonucleotide"
  source 1..20: mol_type = other RNA
taatcttagagggagtccca

SEQ ID NO: 7048 - RNA, 20 nt, synthetic construct
  misc_feature 1..20: note = source = /note="Description of Artificial Sequence: Synthetic oligonucleotide"
  source 1..20: mol_type = other RNA
cttctaatcttagagggagt

SEQ ID NO: 7049 - RNA, 20 nt, synthetic construct
  misc_feature 1..20: note = source = /note="Description of Artificial Sequence: Synthetic oligonucleotide"
  source 1..20: mol_type = other RNA
ccttctaatcttagagggag

SEQ ID NO: 7050 - RNA, 20 nt, synthetic construct
  misc_feature 1..20: note = source = /note="Description of Artificial Sequence: Synthetic oligonucleotide"
  source 1..20: mol_type = other RNA
ctgagttttagtcttcccac

SEQ ID NO: 7051 - RNA, 20 nt, synthetic construct
  misc_feature 1..20: note = source = /note="Description of Artificial Sequence: Synthetic oligonucleotide"
  source 1..20: mol_type = other RNA
tctgagttttagtcttccca

SEQ ID NO: 7052 - RNA, 20 nt, synthetic construct
  misc_feature 1..20: note = source = /note="Description of Artificial Sequence: Synthetic oligonucleotide"
  source 1..20: mol_type = other RNA
ttctgagttttagtcttccc

SEQ ID NO: 7053 - RNA, 20 nt, synthetic construct
  misc_feature 1..20: note = source = /note="Description of Artificial Sequence: Synthetic oligonucleotide"
  source 1..20: mol_type = other RNA
aaattctgagttttagtctt

SEQ ID NO: 7054 - RNA, 20 nt, synthetic construct
  misc_feature 1..20: note = source = /note="Description of Artificial Sequence: Synthetic oligonucleotide"
  source 1..20: mol_type = other RNA
aaaattctgagttttagtct

SEQ ID NO: 7055 - RNA, 20 nt, synthetic construct
  misc_feature 1..20: note = source = /note="Description of Artificial Sequence: Synthetic oligonucleotide"
  source 1..20: mol_type = other RNA
tttcccaccctggaagagac

SEQ ID NO: 7056 - RNA, 20 nt, synthetic construct
  misc_feature 1..20: note = source = /note="Description of Artificial Sequence: Synthetic oligonucleotide"
  source 1..20: mol_type = other RNA
gtttcccaccctggaagaga

SEQ ID NO: 7057 - RNA, 20 nt, synthetic construct
  misc_feature 1..20: note = source = /note="Description of Artificial Sequence: Synthetic oligonucleotide"
  source 1..20: mol_type = other RNA
cgtttcccaccctggaagag

SEQ ID NO: 7058 - RNA, 20 nt, synthetic construct
  misc_feature 1..20: note = source = /note="Description of Artificial Sequence: Synthetic oligonucleotide"
  source 1..20: mol_type = other RNA
gaaaggggtcacgtttccca

SEQ ID NO: 7059 - RNA, 20 nt, synthetic construct
  misc_feature 1..20: note = source = /note="Description of Artificial Sequence: Synthetic oligonucleotide"
  source 1..20: mol_type = other RNA
ggaaaggggtcacgtttccc

SEQ ID NO: 7060 - RNA, 20 nt, synthetic construct
  misc_feature 1..20: note = source = /note="Description of Artificial Sequence: Synthetic oligonucleotide"
  source 1..20: mol_type = other RNA
taaggaaaggggtcacgttt

SEQ ID NO: 7061 - RNA, 20 nt, synthetic construct
  misc_feature 1..20: note = source = /note="Description of Artificial Sequence: Synthetic oligonucleotide"
  source 1..20: mol_type = other RNA
gtaaggaaaggggtcacgtt

SEQ ID NO: 7062 - RNA, 20 nt, synthetic construct
  misc_feature 1..20: note = source = /note="Description of Artificial Sequence: Synthetic oligonucleotide"
  source 1..20: mol_type = other RNA
taggaggactcaaaaatacc

SEQ ID NO: 7063 - RNA, 20 nt, synthetic construct
  misc_feature 1..20: note = source = /note="Description of Artificial Sequence: Synthetic oligonucleotide"
  source 1..20: mol_type = other RNA
agttaggaggactcaaaaat

SEQ ID NO: 7064 - RNA, 20 nt, synthetic construct
  misc_feature 1..20: note = source = /note="Description of Artificial Sequence: Synthetic oligonucleotide"
  source 1..20: mol_type = other RNA
gtggaaggtccttggaggtg

SEQ ID NO: 7065 - RNA, 20 nt, synthetic construct
  misc_feature 1..20: note = source = /note="Description of Artificial Sequence: Synthetic oligonucleotide"
  source 1..20: mol_type = other RNA
gggacctactcggtggaagg

SEQ ID NO: 7066 - RNA, 20 nt, synthetic construct
  misc_feature 1..20: note = source = /note="Description of Artificial Sequence: Synthetic oligonucleotide"
  source 1..20: mol_type = other RNA
gcctcgaagattcaggaggg

SEQ ID NO: 7067 - RNA, 20 nt, synthetic construct
  misc_feature 1..20: note = source = /note="Description of Artificial Sequence: Synthetic oligonucleotide"
  source 1..20: mol_type = other RNA
acttcatattcctttcacgt

SEQ ID NO: 7068 - RNA, 20 nt, synthetic construct
  misc_feature 1..20: note = source = /note="Description of Artificial Sequence: Synthetic oligonucleotide"
  source 1..20: mol_type = other RNA
ctacgaatcccacttcatat

SEQ ID NO: 7069 - RNA, 20 nt, synthetic construct
  misc_feature 1..20: note = source = /note="Description of Artificial Sequence: Synthetic oligonucleotide"
  source 1..20: mol_type = other RNA
atgtctacttctctacgaat

SEQ ID NO: 7070 - RNA, 20 nt, synthetic construct
  misc_feature 1..20: note = source = /note="Description of Artificial Sequence: Synthetic oligonucleotide"
  source 1..20: mol_type = other RNA
tatgtctacttctctacgaa

SEQ ID NO: 7071 - RNA, 20 nt, synthetic construct
  misc_feature 1..20: note = source = /note="Description of Artificial Sequence: Synthetic oligonucleotide"
  source 1..20: mol_type = other RNA
atataaacgaccaaatagtt

SEQ ID NO: 7072 - RNA, 20 nt, synthetic construct
  misc_feature 1..20: note = source = /note="Description of Artificial Sequence: Synthetic oligonucleotide"
  source 1..20: mol_type = other RNA
tttgtgaatgaatataaacg

SEQ ID NO: 7073 - RNA, 20 nt, synthetic construct
  misc_feature 1..20: note = source = /note="Description of Artificial Sequence: Synthetic oligonucleotide"
  source 1..20: mol_type = other RNA
gagaaacccaagttatgcaa

SEQ ID NO: 7074 - RNA, 20 nt, synthetic construct
  misc_feature 1..20: note = source = /note="Description of Artificial Sequence: Synthetic oligonucleotide"
  source 1..20: mol_type = other RNA
caagggtgttgtgggagaaa

SEQ ID NO: 7075 - RNA, 20 nt, synthetic construct
  misc_feature 1..20: note = source = /note="Description of Artificial Sequence: Synthetic oligonucleotide"
  source 1..20: mol_type = other RNA
ccaagggtgttgtgggagaa

SEQ ID NO: 7076 - RNA, 20 nt, synthetic construct
  misc_feature 1..20: note = source = /note="Description of Artificial Sequence: Synthetic oligonucleotide"
  source 1..20: mol_type = other RNA
ctggttggtcgaagctcaac

SEQ ID NO: 7077 - RNA, 20 nt, synthetic construct
  misc_feature 1..20: note = source = /note="Description of Artificial Sequence: Synthetic oligonucleotide"
  source 1..20: mol_type = other RNA
actggttggtcgaagctcaa

SEQ ID NO: 7078 - RNA, 20 nt, synthetic construct
  misc_feature 1..20: note = source = /note="Description of Artificial Sequence: Synthetic oligonucleotide"
  source 1..20: mol_type = other RNA
gactggttggtcgaagctca

SEQ ID NO: 7079 - RNA, 20 nt, synthetic construct
  misc_feature 1..20: note = source = /note="Description of Artificial Sequence: Synthetic oligonucleotide"
  source 1..20: mol_type = other RNA
gtctgtgttcagtgtttagg

SEQ ID NO: 7080 - RNA, 20 nt, synthetic construct
  misc_feature 1..20: note = source = /note="Description of Artificial Sequence: Synthetic oligonucleotide"
  source 1..20: mol_type = other RNA
cacaggaggttaaattaagg

SEQ ID NO: 7081 - RNA, 20 nt, synthetic construct
  misc_feature 1..20: note = source = /note="Description of Artificial Sequence: Synthetic oligonucleotide"
  source 1..20: mol_type = other RNA
tgttcgtcgtctgtgatcga

SEQ ID NO: 7082 - RNA, 20 nt, synthetic construct
  misc_feature 1..20: note = source = /note="Description of Artificial Sequence: Synthetic oligonucleotide"
  source 1..20: mol_type = other RNA
ttgttcgtcgtctgtgatcg

SEQ ID NO: 7083 - RNA, 20 nt, synthetic construct
  misc_feature 1..20: note = source = /note="Description of Artificial Sequence: Synthetic oligonucleotide"
  source 1..20: mol_type = other RNA
agaacactggtttacacact

SEQ ID NO: 7084 - RNA, 20 nt, synthetic construct
  misc_feature 1..20: note = source = /note="Description of Artificial Sequence: Synthetic oligonucleotide"
  source 1..20: mol_type = other RNA
gagaacactggtttacacac

SEQ ID NO: 7085 - RNA, 20 nt, synthetic construct
  misc_feature 1..20: note = source = /note="Description of Artificial Sequence: Synthetic oligonucleotide"
  source 1..20: mol_type = other RNA
atcactgcctatggcacaca

SEQ ID NO: 7086 - RNA, 20 nt, synthetic construct
  misc_feature 1..20: note = source = /note="Description of Artificial Sequence: Synthetic oligonucleotide"
  source 1..20: mol_type = other RNA
catattcttatcactgccta

SEQ ID NO: 7087 - RNA, 20 nt, synthetic construct
  misc_feature 1..20: note = source = /note="Description of Artificial Sequence: Synthetic oligonucleotide"
  source 1..20: mol_type = other RNA
aggtctcatgtagcattttc

SEQ ID NO: 7088 - RNA, 20 nt, synthetic construct
  misc_feature 1..20: note = source = /note="Description of Artificial Sequence: Synthetic oligonucleotide"
  source 1..20: mol_type = other RNA
gaaaattagattttataaaa

SEQ ID NO: 7089 - RNA, 20 nt, synthetic construct
  misc_feature 1..20: note = source = /note="Description of Artificial Sequence: Synthetic oligonucleotide"
  source 1..20: mol_type = other RNA
ttttctagaacattatttca

SEQ ID NO: 7090 - RNA, 20 nt, synthetic construct
  misc_feature 1..20: note = source = /note="Description of Artificial Sequence: Synthetic oligonucleotide"
  source 1..20: mol_type = other RNA
gaataataattcaggctttt

SEQ ID NO: 7091 - RNA, 20 nt, synthetic construct
  misc_feature 1..20: note = source = /note="Description of Artificial Sequence: Synthetic oligonucleotide"
  source 1..20: mol_type = other RNA
aatgtgctgaataataattc

SEQ ID NO: 7092 - RNA, 20 nt, synthetic construct
  misc_feature 1..20: note = source = /note="Description of Artificial Sequence: Synthetic oligonucleotide"
  source 1..20: mol_type = other RNA
ctcagaggcatttctaactc

SEQ ID NO: 7093 - RNA, 20 nt, synthetic construct
  misc_feature 1..20: note = source = /note="Description of Artificial Sequence: Synthetic oligonucleotide"
  source 1..20: mol_type = other RNA
aactctaaatcttttctcag

SEQ ID NO: 7094 - RNA, 20 nt, synthetic construct
  misc_feature 1..20: note = source = /note="Description of Artificial Sequence: Synthetic oligonucleotide"
  source 1..20: mol_type = other RNA
tgcattattgaagcagtgct

SEQ ID NO: 7095 - RNA, 20 nt, synthetic construct
  misc_feature 1..20: note = source = /note="Description of Artificial Sequence: Synthetic oligonucleotide"
  source 1..20: mol_type = other RNA
ctgcattattgaagcagtgc

SEQ ID NO: 7096 - RNA, 20 nt, synthetic construct
  misc_feature 1..20: note = source = /note="Description of Artificial Sequence: Synthetic oligonucleotide"
  source 1..20: mol_type = other RNA
gataagggggaaaaaaaaac

SEQ ID NO: 7097 - RNA, 20 nt, synthetic construct
  misc_feature 1..20: note = source = /note="Description of Artificial Sequence: Synthetic oligonucleotide"
  source 1..20: mol_type = other RNA
taaaatcactgcagataagg

SEQ ID NO: 7098 - RNA, 20 nt, synthetic construct
  misc_feature 1..20: note = source = /note="Description of Artificial Sequence: Synthetic oligonucleotide"
  source 1..20: mol_type = other RNA
gtaaaatcactgcagataag

SEQ ID NO: 7099 - RNA, 20 nt, synthetic construct
  misc_feature 1..20: note = source = /note="Description of Artificial Sequence: Synthetic oligonucleotide"
  source 1..20: mol_type = other RNA
ggtaaaatcactgcagataa

SEQ ID NO: 7100 - RNA, 20 nt, synthetic construct
  misc_feature 1..20: note = source = /note="Description of Artificial Sequence: Synthetic oligonucleotide"
  source 1..20: mol_type = other RNA
tggtaaaatcactgcagata

SEQ ID NO: 7101 - RNA, 20 nt, synthetic construct
  misc_feature 1..20: note = source = /note="Description of Artificial Sequence: Synthetic oligonucleotide"
  source 1..20: mol_type = other RNA
taagatgtagcatgaagaga

SEQ ID NO: 7102 - RNA, 20 nt, synthetic construct
  misc_feature 1..20: note = source = /note="Description of Artificial Sequence: Synthetic oligonucleotide"
  source 1..20: mol_type = other RNA
atgtttcaatgttctctttg

SEQ ID NO: 7103 - RNA, 20 nt, synthetic construct
  misc_feature 1..20: note = source = /note="Description of Artificial Sequence: Synthetic oligonucleotide"
  source 1..20: mol_type = other RNA
ccagaaatgagttggcattc

SEQ ID NO: 7104 - RNA, 20 nt, synthetic construct
  misc_feature 1..20: note = source = /note="Description of Artificial Sequence: Synthetic oligonucleotide"
  source 1..20: mol_type = other RNA
ttagaaccccagaaatgagt

SEQ ID NO: 7105 - RNA, 20 nt, synthetic construct
  misc_feature 1..20: note = source = /note="Description of Artificial Sequence: Synthetic oligonucleotide"
  source 1..20: mol_type = other RNA
tgctctgctaaaaaaggtta

SEQ ID NO: 7106 - RNA, 20 nt, synthetic construct
  misc_feature 1..20: note = source = /note="Description of Artificial Sequence: Synthetic oligonucleotide"
  source 1..20: mol_type = other RNA
ctacactgctctgctaaaaa

SEQ ID NO: 7107 - RNA, 20 nt, synthetic construct
  misc_feature 1..20: note = source = /note="Description of Artificial Sequence: Synthetic oligonucleotide"
  source 1..20: mol_type = other RNA
ttactcaggccgaccattta

SEQ ID NO: 7108 - RNA, 20 nt, synthetic construct
  misc_feature 1..20: note = source = /note="Description of Artificial Sequence: Synthetic oligonucleotide"
  source 1..20: mol_type = other RNA
ttacagttaaaatgttactc

SEQ ID NO: 7109 - RNA, 20 nt, synthetic construct
  misc_feature 1..20: note = source = /note="Description of Artificial Sequence: Synthetic oligonucleotide"
  source 1..20: mol_type = other RNA
tgtcagacatgtctcttcaa

SEQ ID NO: 7110 - RNA, 20 nt, synthetic construct
  misc_feature 1..20: note = source = /note="Description of Artificial Sequence: Synthetic oligonucleotide"
  source 1..20: mol_type = other RNA
aaaggtactttagtcacaca

SEQ ID NO: 7111 - RNA, 20 nt, synthetic construct
  misc_feature 1..20: note = source = /note="Description of Artificial Sequence: Synthetic oligonucleotide"
  source 1..20: mol_type = other RNA
ggttgatctcttaatagaaa

SEQ ID NO: 7112 - RNA, 20 nt, synthetic construct
  misc_feature 1..20: note = source = /note="Description of Artificial Sequence: Synthetic oligonucleotide"
  source 1..20: mol_type = other RNA
caaagagtagaaggaaatgg

SEQ ID NO: 7113 - RNA, 20 nt, synthetic construct
  misc_feature 1..20: note = source = /note="Description of Artificial Sequence: Synthetic oligonucleotide"
  source 1..20: mol_type = other RNA
gaacaaagagtagaaggaaa

SEQ ID NO: 7114 - RNA, 20 nt, synthetic construct
  misc_feature 1..20: note = source = /note="Description of Artificial Sequence: Synthetic oligonucleotide"
  source 1..20: mol_type = other RNA
aggggagaacaaagagtaga

SEQ ID NO: 7115 - RNA, 20 nt, synthetic construct
  misc_feature 1..20: note = source = /note="Description of Artificial Sequence: Synthetic oligonucleotide"
  source 1..20: mol_type = other RNA
ctgaattaactttatttaag

SEQ ID NO: 7116 - RNA, 20 nt, synthetic construct
  misc_feature 1..20: note = source = /note="Description of Artificial Sequence: Synthetic oligonucleotide"
  source 1..20: mol_type = other RNA
gctgaattaactttatttaa

SEQ ID NO: 7117 - RNA, 20 nt, synthetic construct
  misc_feature 1..20: note = source = /note="Description of Artificial Sequence: Synthetic oligonucleotide"
  source 1..20: mol_type = other RNA
agctgaattaactttattta

SEQ ID NO: 7118 - RNA, 20 nt, synthetic construct
  misc_feature 1..20: note = source = /note="Description of Artificial Sequence: Synthetic oligonucleotide"
  source 1..20: mol_type = other RNA
tagctctaatattcacagca

SEQ ID NO: 7119 - RNA, 20 nt, synthetic construct
  misc_feature 1..20: note = source = /note="Description of Artificial Sequence: Synthetic oligonucleotide"
  source 1..20: mol_type = other RNA
tccttttgttttagtcagcg

SEQ ID NO: 7120 - RNA, 20 nt, synthetic construct
  misc_feature 1..20: note = source = /note="Description of Artificial Sequence: Synthetic oligonucleotide"
  source 1..20: mol_type = other RNA
ctctatcgtatccatctttt

SEQ ID NO: 7121 - RNA, 20 nt, synthetic construct
  misc_feature 1..20: note = source = /note="Description of Artificial Sequence: Synthetic oligonucleotide"
  source 1..20: mol_type = other RNA
aaatgttctgctttaacctg

SEQ ID NO: 7122 - RNA, 20 nt, synthetic construct
  misc_feature 1..20: note = source = /note="Description of Artificial Sequence: Synthetic oligonucleotide"
  source 1..20: mol_type = other RNA
gattgtagaggaaaacatct

SEQ ID NO: 7123 - RNA, 20 nt, synthetic construct
  misc_feature 1..20: note = source = /note="Description of Artificial Sequence: Synthetic oligonucleotide"
  source 1..20: mol_type = other RNA
gaacaaaaacaggattgtag

SEQ ID NO: 7124 - RNA, 20 nt, synthetic construct
  misc_feature 1..20: note = source = /note="Description of Artificial Sequence: Synthetic oligonucleotide"
  source 1..20: mol_type = other RNA
atttttcatagaacaaaaac

SEQ ID NO: 7125 - RNA, 20 nt, synthetic construct
  misc_feature 1..20: note = source = /note="Description of Artificial Sequence: Synthetic oligonucleotide"
  source 1..20: mol_type = other RNA
tagtgaatgatccaagttta

SEQ ID NO: 7126 - RNA, 20 nt, synthetic construct
  misc_feature 1..20: note = source = /note="Description of Artificial Sequence: Synthetic oligonucleotide"
  source 1..20: mol_type = other RNA
atataaccttaacattacct

SEQ ID NO: 7127 - RNA, 20 nt, synthetic construct
  misc_feature 1..20: note = source = /note="Description of Artificial Sequence: Synthetic oligonucleotide"
  source 1..20: mol_type = other RNA
ctcaaaaaatctaaacattt

SEQ ID NO: 7128 - RNA, 20 nt, synthetic construct
  misc_feature 1..20: note = source = /note="Description of Artificial Sequence: Synthetic oligonucleotide"
  source 1..20: mol_type = other RNA
ttcatagagaatgcagggag

SEQ ID NO: 7129 - RNA, 20 nt, synthetic construct
  misc_feature 1..20: note = source = /note="Description of Artificial Sequence: Synthetic oligonucleotide"
  source 1..20: mol_type = other RNA
cttcatagagaatgcaggga

SEQ ID NO: 7130 - RNA, 20 nt, synthetic construct
  misc_feature 1..20: note = source = /note="Description of Artificial Sequence: Synthetic oligonucleotide"
  source 1..20: mol_type = other RNA
tcttcatagagaatgcaggg

SEQ ID NO: 7131 - RNA, 20 nt, synthetic construct
  misc_feature 1..20: note = source = /note="Description of Artificial Sequence: Synthetic oligonucleotide"
  source 1..20: mol_type = other RNA
gtatcttcatagagaatgca

SEQ ID NO: 7132 - RNA, 20 nt, synthetic construct
  misc_feature 1..20: note = source = /note="Description of Artificial Sequence: Synthetic oligonucleotide"
  source 1..20: mol_type = other RNA
tgtatcttcatagagaatgc

SEQ ID NO: 7133 - RNA, 20 nt, synthetic construct
  misc_feature 1..20: note = source = /note="Description of Artificial Sequence: Synthetic oligonucleotide"
  source 1..20: mol_type = other RNA
tctgttcataggatataatt

SEQ ID NO: 7134 - RNA, 20 nt, synthetic construct
  misc_feature 1..20: note = source = /note="Description of Artificial Sequence: Synthetic oligonucleotide"
  source 1..20: mol_type = other RNA
gaagagaaaggtctgttcat

SEQ ID NO: 7135 - RNA, 20 nt, synthetic construct
  misc_feature 1..20: note = source = /note="Description of Artificial Sequence: Synthetic oligonucleotide"
  source 1..20: mol_type = other RNA
tgcctttgaaatgaagagaa

SEQ ID NO: 7136 - RNA, 20 nt, synthetic construct
  misc_feature 1..20: note = source = /note="Description of Artificial Sequence: Synthetic oligonucleotide"
  source 1..20: mol_type = other RNA
gagttcattttcaagagcaa

SEQ ID NO: 7137 - RNA, 20 nt, synthetic construct
  misc_feature 1..20: note = source = /note="Description of Artificial Sequence: Synthetic oligonucleotide"
  source 1..20: mol_type = other RNA
ctgatgagaacctgtggact

SEQ ID NO: 7138 - RNA, 20 nt, synthetic construct
  misc_feature 1..20: note = source = /note="Description of Artificial Sequence: Synthetic oligonucleotide"
  source 1..20: mol_type = other RNA
gaggcactgatgagaacctg

SEQ ID NO: 7139 - RNA, 20 nt, synthetic construct
  misc_feature 1..20: note = source = /note="Description of Artificial Sequence: Synthetic oligonucleotide"
  source 1..20: mol_type = other RNA
taatctgtgcatagatcttg

SEQ ID NO: 7140 - RNA, 20 nt, synthetic construct
  misc_feature 1..20: note = source = /note="Description of Artificial Sequence: Synthetic oligonucleotide"
  source 1..20: mol_type = other RNA
aaggtaccttatcgtatgaa

SEQ ID NO: 7141 - RNA, 20 nt, synthetic construct
  misc_feature 1..20: note = source = /note="Description of Artificial Sequence: Synthetic oligonucleotide"
  source 1..20: mol_type = other RNA
gacttatttgtcataaaggt

SEQ ID NO: 7142 - RNA, 20 nt, synthetic construct
  misc_feature 1..20: note = source = /note="Description of Artificial Sequence: Synthetic oligonucleotide"
  source 1..20: mol_type = other RNA
tttgtgtcctagtaacaaat

SEQ ID NO: 7143 - RNA, 20 nt, synthetic construct
  misc_feature 1..20: note = source = /note="Description of Artificial Sequence: Synthetic oligonucleotide"
  source 1..20: mol_type = other RNA
aggacctgtattactttgtg

SEQ ID NO: 7144 - RNA, 20 nt, synthetic construct
  misc_feature 1..20: note = source = /note="Description of Artificial Sequence: Synthetic oligonucleotide"
  source 1..20: mol_type = other RNA
tccacgacacaccgtaaagg

SEQ ID NO: 7145 - RNA, 20 nt, synthetic construct
  misc_feature 1..20: note = source = /note="Description of Artificial Sequence: Synthetic oligonucleotide"
  source 1..20: mol_type = other RNA
tacagacctttccacgacac

SEQ ID NO: 7146 - RNA, 20 nt, synthetic construct
  misc_feature 1..20: note = source = /note="Description of Artificial Sequence: Synthetic oligonucleotide"
  source 1..20: mol_type = other RNA
actactatcctacagacctt

SEQ ID NO: 7147 - RNA, 20 nt, synthetic construct
  misc_feature 1..20: note = source = /note="Description of Artificial Sequence: Synthetic oligonucleotide"
  source 1..20: mol_type = other RNA
attatactactatcctacag

SEQ ID NO: 7148 - RNA, 20 nt, synthetic construct
  misc_feature 1..20: note = source = /note="Description of Artificial Sequence: Synthetic oligonucleotide"
  source 1..20: mol_type = other RNA
tttcagaaattatactacta

SEQ ID NO: 7149 - RNA, 20 nt, synthetic construct
  misc_feature 1..20: note = source = /note="Description of Artificial Sequence: Synthetic oligonucleotide"
  source 1..20: mol_type = other RNA
ttaaaacaaagaaattacgt

SEQ ID NO: 7150 - RNA, 20 nt, synthetic construct
  misc_feature 1..20: note = source = /note="Description of Artificial Sequence: Synthetic oligonucleotide"
  source 1..20: mol_type = other RNA
ttaacgtgtaattttaaaaa

SEQ ID NO: 7151 - RNA, 20 nt, synthetic construct
  misc_feature 1..20: note = source = /note="Description of Artificial Sequence: Synthetic oligonucleotide"
  source 1..20: mol_type = other RNA
atctatgggactggttcttt

SEQ ID NO: 7152 - RNA, 20 nt, synthetic construct
  misc_feature 1..20: note = source = /note="Description of Artificial Sequence: Synthetic oligonucleotide"
  source 1..20: mol_type = other RNA
tatctatgggactggttctt

SEQ ID NO: 7153 - RNA, 20 nt, synthetic construct
  misc_feature 1..20: note = source = /note="Description of Artificial Sequence: Synthetic oligonucleotide"
  source 1..20: mol_type = other RNA
gtgatatctatctatgggac

SEQ ID NO: 7154 - RNA, 20 nt, synthetic construct
  misc_feature 1..20: note = source = /note="Description of Artificial Sequence: Synthetic oligonucleotide"
  source 1..20: mol_type = other RNA
catatgtgatatctatctat

SEQ ID NO: 7155 - RNA, 20 nt, synthetic construct
  misc_feature 1..20: note = source = /note="Description of Artificial Sequence: Synthetic oligonucleotide"
  source 1..20: mol_type = other RNA
tcatatgtgatatctatcta

SEQ ID NO: 7156 - RNA, 20 nt, synthetic construct
  misc_feature 1..20: note = source = /note="Description of Artificial Sequence: Synthetic oligonucleotide"
  source 1..20: mol_type = other RNA
agagatgtgtcctaatgtgt

SEQ ID NO: 7157 - RNA, 20 nt, synthetic construct
  misc_feature 1..20: note = source = /note="Description of Artificial Sequence: Synthetic oligonucleotide"
  source 1..20: mol_type = other RNA
ttcttcgtccaggatccgtt

SEQ ID NO: 7158 - RNA, 20 nt, synthetic construct
  misc_feature 1..20: note = source = /note="Description of Artificial Sequence: Synthetic oligonucleotide"
  source 1..20: mol_type = other RNA
ctgtaattcttcgtccagga

SEQ ID NO: 7159 - RNA, 20 nt, synthetic construct
  misc_feature 1..20: note = source = /note="Description of Artificial Sequence: Synthetic oligonucleotide"
  source 1..20: mol_type = other RNA
ttaaaaactgtaattcttcg

SEQ ID NO: 7160 - RNA, 20 nt, synthetic construct
  misc_feature 1..20: note = source = /note="Description of Artificial Sequence: Synthetic oligonucleotide"
  source 1..20: mol_type = other RNA
agacgccctctctattttaa

SEQ ID NO: 7161 - RNA, 20 nt, synthetic construct
  misc_feature 1..20: note = source = /note="Description of Artificial Sequence: Synthetic oligonucleotide"
  source 1..20: mol_type = other RNA
gagacgccctctctatttta

SEQ ID NO: 7162 - RNA, 20 nt, synthetic construct
  misc_feature 1..20: note = source = /note="Description of Artificial Sequence: Synthetic oligonucleotide"
  source 1..20: mol_type = other RNA
aagtgagctcagttgagacg

SEQ ID NO: 7163 - RNA, 20 nt, synthetic construct
  misc_feature 1..20: note = source = /note="Description of Artificial Sequence: Synthetic oligonucleotide"
  source 1..20: mol_type = other RNA
gaagtgagctcagttgagac

SEQ ID NO: 7164 - RNA, 20 nt, synthetic construct
  misc_feature 1..20: note = source = /note="Description of Artificial Sequence: Synthetic oligonucleotide"
  source 1..20: mol_type = other RNA
aaagcaagtaccctggacag

SEQ ID NO: 7165 - RNA, 20 nt, synthetic construct
  misc_feature 1..20: note = source = /note="Description of Artificial Sequence: Synthetic oligonucleotide"
  source 1..20: mol_type = other RNA
tgcccttaaagcaagtaccc

SEQ ID NO: 7166 - RNA, 20 nt, synthetic construct
  misc_feature 1..20: note = source = /note="Description of Artificial Sequence: Synthetic oligonucleotide"
  source 1..20: mol_type = other RNA
cttcatcttcaagaatcact

SEQ ID NO: 7167 - RNA, 20 nt, synthetic construct
  misc_feature 1..20: note = source = /note="Description of Artificial Sequence: Synthetic oligonucleotide"
  source 1..20: mol_type = other RNA
tcttcatcttcaagaatcac

SEQ ID NO: 7168 - RNA, 20 nt, synthetic construct
  misc_feature 1..20: note = source = /note="Description of Artificial Sequence: Synthetic oligonucleotide"
  source 1..20: mol_type = other RNA
ttaaaaagctttcttcattg

SEQ ID NO: 7169 - RNA, 20 nt, synthetic construct
  misc_feature 1..20: note = source = /note="Description of Artificial Sequence: Synthetic oligonucleotide"
  source 1..20: mol_type = other RNA
cataaattcttctatggggc

SEQ ID NO: 7170 - RNA, 20 nt, synthetic construct
  misc_feature 1..20: note = source = /note="Description of Artificial Sequence: Synthetic oligonucleotide"
  source 1..20: mol_type = other RNA
ggaacataaattcttctatg

SEQ ID NO: 7171 - RNA, 20 nt, synthetic construct
  misc_feature 1..20: note = source = /note="Description of Artificial Sequence: Synthetic oligonucleotide"
  source 1..20: mol_type = other RNA
aggaacataaattcttctat

SEQ ID NO: 7172 - RNA, 20 nt, synthetic construct
  misc_feature 1..20: note = source = /note="Description of Artificial Sequence: Synthetic oligonucleotide"
  source 1..20: mol_type = other RNA
taggaacataaattcttcta

SEQ ID NO: 7173 - RNA, 20 nt, synthetic construct
  misc_feature 1..20: note = source = /note="Description of Artificial Sequence: Synthetic oligonucleotide"
  source 1..20: mol_type = other RNA
gccaatatgatcacatcact

SEQ ID NO: 7174 - RNA, 20 nt, synthetic construct
  misc_feature 1..20: note = source = /note="Description of Artificial Sequence: Synthetic oligonucleotide"
  source 1..20: mol_type = other RNA
ttggaaaagaaacactggat

SEQ ID NO: 7175 - RNA, 20 nt, synthetic construct
  misc_feature 1..20: note = source = /note="Description of Artificial Sequence: Synthetic oligonucleotide"
  source 1..20: mol_type = other RNA
tgtccttggaaaagaaacac

SEQ ID NO: 7176 - RNA, 20 nt, synthetic construct
  misc_feature 1..20: note = source = /note="Description of Artificial Sequence: Synthetic oligonucleotide"
  source 1..20: mol_type = other RNA
ctccttatcagtactgtcct

SEQ ID NO: 7177 - RNA, 20 nt, synthetic construct
  misc_feature 1..20: note = source = /note="Description of Artificial Sequence: Synthetic oligonucleotide"
  source 1..20: mol_type = other RNA
tcaggacaaagaggtagatt

SEQ ID NO: 7178 - RNA, 20 nt, synthetic construct
  misc_feature 1..20: note = source = /note="Description of Artificial Sequence: Synthetic oligonucleotide"
  source 1..20: mol_type = other RNA
atgatctgttcaggacaaag

SEQ ID NO: 7179 - RNA, 20 nt, synthetic construct
  misc_feature 1..20: note = source = /note="Description of Artificial Sequence: Synthetic oligonucleotide"
  source 1..20: mol_type = other RNA
tagatggagatgatctgttc

SEQ ID NO: 7180 - RNA, 20 nt, synthetic construct
  misc_feature 1..20: note = source = /note="Description of Artificial Sequence: Synthetic oligonucleotide"
  source 1..20: mol_type = other RNA
tgagccaaactatgaataga

SEQ ID NO: 7181 - RNA, 20 nt, synthetic construct
  misc_feature 1..20: note = source = /note="Description of Artificial Sequence: Synthetic oligonucleotide"
  source 1..20: mol_type = other RNA
ggcatggcatagccgacatg

SEQ ID NO: 7182 - RNA, 20 nt, synthetic construct
  misc_feature 1..20: note = source = /note="Description of Artificial Sequence: Synthetic oligonucleotide"
  source 1..20: mol_type = other RNA
gctaaaagaacgaaacggca

SEQ ID NO: 7183 - RNA, 20 nt, synthetic construct
  misc_feature 1..20: note = source = /note="Description of Artificial Sequence: Synthetic oligonucleotide"
  source 1..20: mol_type = other RNA
aacaagctaaaagaacgaaa

SEQ ID NO: 7184 - RNA, 20 nt, synthetic construct
  misc_feature 1..20: note = source = /note="Description of Artificial Sequence: Synthetic oligonucleotide"
  source 1..20: mol_type = other RNA
aagaccactttcggtttgaa

SEQ ID NO: 7185 - RNA, 20 nt, synthetic construct
  misc_feature 1..20: note = source = /note="Description of Artificial Sequence: Synthetic oligonucleotide"
  source 1..20: mol_type = other RNA
gaagaccactttcggtttga

SEQ ID NO: 7186 - RNA, 20 nt, synthetic construct
  misc_feature 1..20: note = source = /note="Description of Artificial Sequence: Synthetic oligonucleotide"
  source 1..20: mol_type = other RNA
ctcatcacgaagaccacttt

SEQ ID NO: 7187 - RNA, 20 nt, synthetic construct
  misc_feature 1..20: note = source = /note="Description of Artificial Sequence: Synthetic oligonucleotide"
  source 1..20: mol_type = other RNA
gcaatgataaatatctactg

SEQ ID NO: 7188 - RNA, 20 nt, synthetic construct
  misc_feature 1..20: note = source = /note="Description of Artificial Sequence: Synthetic oligonucleotide"
  source 1..20: mol_type = other RNA
ggcaatgataaatatctact

SEQ ID NO: 7189 - RNA, 20 nt, synthetic construct
  misc_feature 1..20: note = source = /note="Description of Artificial Sequence: Synthetic oligonucleotide"
  source 1..20: mol_type = other RNA
tggcaatgataaatatctac

SEQ ID NO: 7190 - RNA, 20 nt, synthetic construct
  misc_feature 1..20: note = source = /note="Description of Artificial Sequence: Synthetic oligonucleotide"
  source 1..20: mol_type = other RNA
tacgatactaagagattaac

SEQ ID NO: 7191 - RNA, 20 nt, synthetic construct
  misc_feature 1..20: note = source = /note="Description of Artificial Sequence: Synthetic oligonucleotide"
  source 1..20: mol_type = other RNA
ttacttgtactaatgtagat

SEQ ID NO: 7192 - RNA, 20 nt, synthetic construct
  misc_feature 1..20: note = source = /note="Description of Artificial Sequence: Synthetic oligonucleotide"
  source 1..20: mol_type = other RNA
aatttttaaatattatgctc

SEQ ID NO: 7193 - RNA, 20 nt, synthetic construct
  misc_feature 1..20: note = source = /note="Description of Artificial Sequence: Synthetic oligonucleotide"
  source 1..20: mol_type = other RNA
aaatttttaaatattatgct

SEQ ID NO: 7194 - RNA, 20 nt, synthetic construct
  misc_feature 1..20: note = source = /note="Description of Artificial Sequence: Synthetic oligonucleotide"
  source 1..20: mol_type = other RNA
aaaatttttaaatattatgc

SEQ ID NO: 7195 - RNA, 20 nt, synthetic construct
  misc_feature 1..20: note = source = /note="Description of Artificial Sequence: Synthetic oligonucleotide"
  source 1..20: mol_type = other RNA
tgagttttggttgatttaca

SEQ ID NO: 7196 - RNA, 20 nt, synthetic construct
  misc_feature 1..20: note = source = /note="Description of Artificial Sequence: Synthetic oligonucleotide"
  source 1..20: mol_type = other RNA
ctgagttttggttgatttac

SEQ ID NO: 7197 - RNA, 20 nt, synthetic construct
  misc_feature 1..20: note = source = /note="Description of Artificial Sequence: Synthetic oligonucleotide"
  source 1..20: mol_type = other RNA
agaacaagaatgctgagttt

SEQ ID NO: 7198 - RNA, 20 nt, synthetic construct
  misc_feature 1..20: note = source = /note="Description of Artificial Sequence: Synthetic oligonucleotide"
  source 1..20: mol_type = other RNA
aagacaagacatatacctac

SEQ ID NO: 7199 - RNA, 20 nt, synthetic construct
  misc_feature 1..20: note = source = /note="Description of Artificial Sequence: Synthetic oligonucleotide"
  source 1..20: mol_type = other RNA
tccagaagttgcataaaata

SEQ ID NO: 7200 - RNA, 20 nt, synthetic construct
  misc_feature 1..20: note = source = /note="Description of Artificial Sequence: Synthetic oligonucleotide"
  source 1..20: mol_type = other RNA
cttctggaaacataatttat

SEQ ID NO: 7201 - RNA, 20 nt, synthetic construct
  misc_feature 1..20: note = source = /note="Description of Artificial Sequence: Synthetic oligonucleotide"
  source 1..20: mol_type = other RNA
tcttctggaaacataattta

SEQ ID NO: 7202 - RNA, 20 nt, synthetic construct
  misc_feature 1..20: note = source = /note="Description of Artificial Sequence: Synthetic oligonucleotide"
  source 1..20: mol_type = other RNA
ttcattacaaaaggttcttc

SEQ ID NO: 7203 - RNA, 20 nt, synthetic construct
  misc_feature 1..20: note = source = /note="Description of Artificial Sequence: Synthetic oligonucleotide"
  source 1..20: mol_type = other RNA
tatatatttttcattacaaa

SEQ ID NO: 7204 - RNA, 20 nt, synthetic construct
  misc_feature 1..20: note = source = /note="Description of Artificial Sequence: Synthetic oligonucleotide"
  source 1..20: mol_type = other RNA
tctgaaaagctctgataaat

SEQ ID NO: 7205 - RNA, 20 nt, synthetic construct
  misc_feature 1..20: note = source = /note="Description of Artificial Sequence: Synthetic oligonucleotide"
  source 1..20: mol_type = other RNA
atcttcttaaagattaataa

SEQ ID NO: 7206 - RNA, 20 nt, synthetic construct
  misc_feature 1..20: note = source = /note="Description of Artificial Sequence: Synthetic oligonucleotide"
  source 1..20: mol_type = other RNA
agttaatttgtaggatatta

SEQ ID NO: 7207 - RNA, 20 nt, synthetic construct
  misc_feature 1..20: note = source = /note="Description of Artificial Sequence: Synthetic oligonucleotide"
  source 1..20: mol_type = other RNA
tcatgttttagttaatttgt

SEQ ID NO: 7208 - RNA, 20 nt, synthetic construct
  misc_feature 1..20: note = source = /note="Description of Artificial Sequence: Synthetic oligonucleotide"
  source 1..20: mol_type = other RNA
catttttattcttcctattt

SEQ ID NO: 7209 - RNA, 20 nt, synthetic construct
  misc_feature 1..20: note = source = /note="Description of Artificial Sequence: Synthetic oligonucleotide"
  source 1..20: mol_type = other RNA
aactggttaccataacaatc

SEQ ID NO: 7210 - RNA, 20 nt, synthetic construct
  misc_feature 1..20: note = source = /note="Description of Artificial Sequence: Synthetic oligonucleotide"
  source 1..20: mol_type = other RNA
ttgatctagtcttaatcaac

SEQ ID NO: 7211 - RNA, 20 nt, synthetic construct
  misc_feature 1..20: note = source = /note="Description of Artificial Sequence: Synthetic oligonucleotide"
  source 1..20: mol_type = other RNA
aaggcatgccatctatgttt

SEQ ID NO: 7212 - RNA, 20 nt, synthetic construct
  misc_feature 1..20: note = source = /note="Description of Artificial Sequence: Synthetic oligonucleotide"
  source 1..20: mol_type = other RNA
ttccctaccattgcctcaaa

SEQ ID NO: 7213 - RNA, 20 nt, synthetic construct
  misc_feature 1..20: note = source = /note="Description of Artificial Sequence: Synthetic oligonucleotide"
  source 1..20: mol_type = other RNA
tccttgtaacacaagcattt

SEQ ID NO: 7214 - RNA, 20 nt, synthetic construct
  misc_feature 1..20: note = source = /note="Description of Artificial Sequence: Synthetic oligonucleotide"
  source 1..20: mol_type = other RNA
ttatttaaaaactctgtacc

SEQ ID NO: 7215 - RNA, 20 nt, synthetic construct
  misc_feature 1..20: note = source = /note="Description of Artificial Sequence: Synthetic oligonucleotide"
  source 1..20: mol_type = other RNA
ctaaattgtcacatccccag

SEQ ID NO: 7216 - RNA, 20 nt, synthetic construct
  misc_feature 1..20: note = source = /note="Description of Artificial Sequence: Synthetic oligonucleotide"
  source 1..20: mol_type = other RNA
actaaattgtcacatcccca

SEQ ID NO: 7217 - RNA, 20 nt, synthetic construct
  misc_feature 1..20: note = source = /note="Description of Artificial Sequence: Synthetic oligonucleotide"
  source 1..20: mol_type = other RNA
aactaaattgtcacatcccc

SEQ ID NO: 7218 - RNA, 20 nt, synthetic construct
  misc_feature 1..20: note = source = /note="Description of Artificial Sequence: Synthetic oligonucleotide"
  source 1..20: mol_type = other RNA
gaaattaactatattagagt

SEQ ID NO: 7219 - RNA, 20 nt, synthetic construct
  misc_feature 1..20: note = source = /note="Description of Artificial Sequence: Synthetic oligonucleotide"
  source 1..20: mol_type = other RNA
taccccacaaagctatcaaa

SEQ ID NO: 7220 - RNA, 20 nt, synthetic construct
  misc_feature 1..20: note = source = /note="Description of Artificial Sequence: Synthetic oligonucleotide"
  source 1..20: mol_type = other RNA
ttcagccctaaaatcaagaa

SEQ ID NO: 7221 - RNA, 20 nt, synthetic construct
  misc_feature 1..20: note = source = /note="Description of Artificial Sequence: Synthetic oligonucleotide"
  source 1..20: mol_type = other RNA
ataatttatgatatattact

SEQ ID NO: 7222 - RNA, 20 nt, synthetic construct
  misc_feature 1..20: note = source = /note="Description of Artificial Sequence: Synthetic oligonucleotide"
  source 1..20: mol_type = other RNA
gataatttatgatatattac

SEQ ID NO: 7223 - RNA, 20 nt, synthetic construct
  misc_feature 1..20: note = source = /note="Description of Artificial Sequence: Synthetic oligonucleotide"
  source 1..20: mol_type = other RNA
cttagttctcatagcccctc

SEQ ID NO: 7224 - RNA, 20 nt, synthetic construct
  misc_feature 1..20: note = source = /note="Description of Artificial Sequence: Synthetic oligonucleotide"
  source 1..20: mol_type = other RNA
tgctccttagttctcatagc

SEQ ID NO: 7225 - RNA, 20 nt, synthetic construct
  misc_feature 1..20: note = source = /note="Description of Artificial Sequence: Synthetic oligonucleotide"
  source 1..20: mol_type = other RNA
ttgctccttagttctcatag

SEQ ID NO: 7226 - RNA, 20 nt, synthetic construct
  misc_feature 1..20: note = source = /note="Description of Artificial Sequence: Synthetic oligonucleotide"
  source 1..20: mol_type = other RNA
attgctccttagttctcata

SEQ ID NO: 7227 - RNA, 20 nt, synthetic construct
  misc_feature 1..20: note = source = /note="Description of Artificial Sequence: Synthetic oligonucleotide"
  source 1..20: mol_type = other RNA
tttattatcccgtcgattgc

SEQ ID NO: 7228 - RNA, 20 nt, synthetic construct
  misc_feature 1..20: note = source = /note="Description of Artificial Sequence: Synthetic oligonucleotide"
  source 1..20: mol_type = other RNA
cctttttgtttctttattat

SEQ ID NO: 7229 - RNA, 20 nt, synthetic construct
  misc_feature 1..20: note = source = /note="Description of Artificial Sequence: Synthetic oligonucleotide"
  source 1..20: mol_type = other RNA
ccctttttgtttctttatta

SEQ ID NO: 7230 - RNA, 20 nt, synthetic construct
  misc_feature 1..20: note = source = /note="Description of Artificial Sequence: Synthetic oligonucleotide"
  source 1..20: mol_type = other RNA
ttcttttacaactcacgatt

SEQ ID NO: 7231 - RNA, 20 nt, synthetic construct
  misc_feature 1..20: note = source = /note="Description of Artificial Sequence: Synthetic oligonucleotide"
  source 1..20: mol_type = other RNA
attcttttacaactcacgat

SEQ ID NO: 7232 - RNA, 20 nt, synthetic construct
  misc_feature 1..20: note = source = /note="Description of Artificial Sequence: Synthetic oligonucleotide"
  source 1..20: mol_type = other RNA
tctttcatttaatacaccac

SEQ ID NO: 7233 - RNA, 20 nt, synthetic construct
  misc_feature 1..20: note = source = /note="Description of Artificial Sequence: Synthetic oligonucleotide"
  source 1..20: mol_type = other RNA
gttattctttcatttaatac

SEQ ID NO: 7234 - RNA, 20 nt, synthetic construct
  misc_feature 1..20: note = source = /note="Description of Artificial Sequence: Synthetic oligonucleotide"
  source 1..20: mol_type = other RNA
aacctggactataagattac

SEQ ID NO: 7235 - RNA, 20 nt, synthetic construct
  misc_feature 1..20: note = source = /note="Description of Artificial Sequence: Synthetic oligonucleotide"
  source 1..20: mol_type = other RNA
ctatttatgaggacagaaga

SEQ ID NO: 7236 - RNA, 20 nt, synthetic construct
  misc_feature 1..20: note = source = /note="Description of Artificial Sequence: Synthetic oligonucleotide"
  source 1..20: mol_type = other RNA
aacttgtataagatacacag

SEQ ID NO: 7237 - RNA, 20 nt, synthetic construct
  misc_feature 1..20: note = source = /note="Description of Artificial Sequence: Synthetic oligonucleotide"
  source 1..20: mol_type = other RNA
gttataaaaataatctgtca

SEQ ID NO: 7238 - RNA, 20 nt, synthetic construct
  misc_feature 1..20: note = source = /note="Description of Artificial Sequence: Synthetic oligonucleotide"
  source 1..20: mol_type = other RNA
gtgtagttatataatgacac

SEQ ID NO: 7239 - RNA, 20 nt, synthetic construct
  misc_feature 1..20: note = source = /note="Description of Artificial Sequence: Synthetic oligonucleotide"
  source 1..20: mol_type = other RNA
actttatgtaatttctagga

SEQ ID NO: 7240 - RNA, 20 nt, synthetic construct
  misc_feature 1..20: note = source = /note="Description of Artificial Sequence: Synthetic oligonucleotide"
  source 1..20: mol_type = other RNA
aactttatgtaatttctagg

SEQ ID NO: 7241 - RNA, 20 nt, synthetic construct
  misc_feature 1..20: note = source = /note="Description of Artificial Sequence: Synthetic oligonucleotide"
  source 1..20: mol_type = other RNA
aagaactttatgtaatttct

SEQ ID NO: 7242 - RNA, 20 nt, synthetic construct
  misc_feature 1..20: note = source = /note="Description of Artificial Sequence: Synthetic oligonucleotide"
  source 1..20: mol_type = other RNA
taatgtataggccaacaaat

SEQ ID NO: 7243 - RNA, 20 nt, synthetic construct
  misc_feature 1..20: note = source = /note="Description of Artificial Sequence: Synthetic oligonucleotide"
  source 1..20: mol_type = other RNA
gtaatgtataggccaacaaa

SEQ ID NO: 7244 - RNA, 20 nt, synthetic construct
  misc_feature 1..20: note = source = /note="Description of Artificial Sequence: Synthetic oligonucleotide"
  source 1..20: mol_type = other RNA
aggttatcttggtaatgtat

SEQ ID NO: 7245 - RNA, 20 nt, synthetic construct
  misc_feature 1..20: note = source = /note="Description of Artificial Sequence: Synthetic oligonucleotide"
  source 1..20: mol_type = other RNA
tgaaagtaaaaatatatgcc

SEQ ID NO: 7246 - RNA, 20 nt, synthetic construct
  misc_feature 1..20: note = source = /note="Description of Artificial Sequence: Synthetic oligonucleotide"
  source 1..20: mol_type = other RNA
ttatgaaagtaaaaatatat

SEQ ID NO: 7247 - RNA, 20 nt, synthetic construct
  misc_feature 1..20: note = source = /note="Description of Artificial Sequence: Synthetic oligonucleotide"
  source 1..20: mol_type = other RNA
tgatattatcatatatactc

SEQ ID NO: 7248 - RNA, 20 nt, synthetic construct
  misc_feature 1..20: note = source = /note="Description of Artificial Sequence: Synthetic oligonucleotide"
  source 1..20: mol_type = other RNA
ctgatattatcatatatact

SEQ ID NO: 7249 - RNA, 20 nt, synthetic construct
  misc_feature 1..20: note = source = /note="Description of Artificial Sequence: Synthetic oligonucleotide"
  source 1..20: mol_type = other RNA
tctgatattatcatatatac

SEQ ID NO: 7250 - RNA, 20 nt, synthetic construct
  misc_feature 1..20: note = source = /note="Description of Artificial Sequence: Synthetic oligonucleotide"
  source 1..20: mol_type = other RNA
aattaccgacttaccccact

SEQ ID NO: 7251 - RNA, 20 nt, synthetic construct
  misc_feature 1..20: note = source = /note="Description of Artificial Sequence: Synthetic oligonucleotide"
  source 1..20: mol_type = other RNA
ttctgtaattaccgacttac

SEQ ID NO: 7252 - RNA, 20 nt, synthetic construct
  misc_feature 1..20: note = source = /note="Description of Artificial Sequence: Synthetic oligonucleotide"
  source 1..20: mol_type = other RNA
cttctgtaattaccgactta

SEQ ID NO: 7253 - RNA, 20 nt, synthetic construct
  misc_feature 1..20: note = source = /note="Description of Artificial Sequence: Synthetic oligonucleotide"
  source 1..20: mol_type = other RNA
tcttctgtaattaccgactt

SEQ ID NO: 7254 - RNA, 20 nt, synthetic construct
  misc_feature 1..20: note = source = /note="Description of Artificial Sequence: Synthetic oligonucleotide"
  source 1..20: mol_type = other RNA
ggaccagttcttctgtaatt

SEQ ID NO: 7255 - RNA, 20 nt, synthetic construct
  misc_feature 1..20: note = source = /note="Description of Artificial Sequence: Synthetic oligonucleotide"
  source 1..20: mol_type = other RNA
cgacatttttaatacaatgg

SEQ ID NO: 7256 - RNA, 20 nt, synthetic construct
  misc_feature 1..20: note = source = /note="Description of Artificial Sequence: Synthetic oligonucleotide"
  source 1..20: mol_type = other RNA
tttaacaagattattggttt

SEQ ID NO: 7257 - RNA, 20 nt, synthetic construct
  misc_feature 1..20: note = source = /note="Description of Artificial Sequence: Synthetic oligonucleotide"
  source 1..20: mol_type = other RNA
aaccctcaaaattttactta

SEQ ID NO: 7258 - RNA, 20 nt, synthetic construct
  misc_feature 1..20: note = source = /note="Description of Artificial Sequence: Synthetic oligonucleotide"
  source 1..20: mol_type = other RNA
gtgactgagtccgaactcaa

SEQ ID NO: 7259 - RNA, 20 nt, synthetic construct
  misc_feature 1..20: note = source = /note="Description of Artificial Sequence: Synthetic oligonucleotide"
  source 1..20: mol_type = other RNA
tgtgactgagtccgaactca

SEQ ID NO: 7260 - RNA, 20 nt, synthetic construct
  misc_feature 1..20: note = source = /note="Description of Artificial Sequence: Synthetic oligonucleotide"
  source 1..20: mol_type = other RNA
accctcttcttgtgactgag

SEQ ID NO: 7261 - RNA, 20 nt, synthetic construct
  misc_feature 1..20: note = source = /note="Description of Artificial Sequence: Synthetic oligonucleotide"
  source 1..20: mol_type = other RNA
ggtcacaaattcaaacacga

SEQ ID NO: 7262 - RNA, 20 nt, synthetic construct
  misc_feature 1..20: note = source = /note="Description of Artificial Sequence: Synthetic oligonucleotide"
  source 1..20: mol_type = other RNA
cggtcacaaattcaaacacg

SEQ ID NO: 7263 - RNA, 20 nt, synthetic construct
  misc_feature 1..20: note = source = /note="Description of Artificial Sequence: Synthetic oligonucleotide"
  source 1..20: mol_type = other RNA
gatgaaagttgaggttccca

SEQ ID NO: 7264 - RNA, 20 nt, synthetic construct
  misc_feature 1..20: note = source = /note="Description of Artificial Sequence: Synthetic oligonucleotide"
  source 1..20: mol_type = other RNA
aggggatgaaagttgaggtt

SEQ ID NO: 7265 - RNA, 20 nt, synthetic construct
  misc_feature 1..20: note = source = /note="Description of Artificial Sequence: Synthetic oligonucleotide"
  source 1..20: mol_type = other RNA
gaggggatgaaagttgaggt

SEQ ID NO: 7266 - RNA, 20 nt, synthetic construct
  misc_feature 1..20: note = source = /note="Description of Artificial Sequence: Synthetic oligonucleotide"
  source 1..20: mol_type = other RNA
ctcccctccatagtcctcac

SEQ ID NO: 7267 - RNA, 20 nt, synthetic construct
  misc_feature 1..20: note = source = /note="Description of Artificial Sequence: Synthetic oligonucleotide"
  source 1..20: mol_type = other RNA
tctccccctcccctccatag

SEQ ID NO: 7268 - RNA, 20 nt, synthetic construct
  misc_feature 1..20: note = source = /note="Description of Artificial Sequence: Synthetic oligonucleotide"
  source 1..20: mol_type = other RNA
agtgccatctccccctcccc

SEQ ID NO: 7269 - RNA, 20 nt, synthetic construct
  misc_feature 1..20: note = source = /note="Description of Artificial Sequence: Synthetic oligonucleotide"
  source 1..20: mol_type = other RNA
acgagtgccatctccccctc

SEQ ID NO: 7270 - RNA, 20 nt, synthetic construct
  misc_feature 1..20: note = source = /note="Description of Artificial Sequence: Synthetic oligonucleotide"
  source 1..20: mol_type = other RNA
cacgagtgccatctccccct

SEQ ID NO: 7271 - RNA, 20 nt, synthetic construct
  misc_feature 1..20: note = source = /note="Description of Artificial Sequence: Synthetic oligonucleotide"
  source 1..20: mol_type = other RNA
ccacgagtgccatctccccc

SEQ ID NO: 7272 - RNA, 20 nt, synthetic construct
  misc_feature 1..20: note = source = /note="Description of Artificial Sequence: Synthetic oligonucleotide"
  source 1..20: mol_type = other RNA
tgaccacgagtgccatctcc

SEQ ID NO: 7273 - RNA, 20 nt, synthetic construct
  misc_feature 1..20: note = source = /note="Description of Artificial Sequence: Synthetic oligonucleotide"
  source 1..20: mol_type = other RNA
gtgaccacgagtgccatctc

SEQ ID NO: 7274 - RNA, 20 nt, synthetic construct
  misc_feature 1..20: note = source = /note="Description of Artificial Sequence: Synthetic oligonucleotide"
  source 1..20: mol_type = other RNA
cgtgaccacgagtgccatct

SEQ ID NO: 7275 - RNA, 20 nt, synthetic construct
  misc_feature 1..20: note = source = /note="Description of Artificial Sequence: Synthetic oligonucleotide"
  source 1..20: mol_type = other RNA
ccgtgaccacgagtgccatc

SEQ ID NO: 7276 - RNA, 20 nt, synthetic construct
  misc_feature 1..20: note = source = /note="Description of Artificial Sequence: Synthetic oligonucleotide"
  source 1..20: mol_type = other RNA
gaggatccgtgaccacgagt

SEQ ID NO: 7277 - RNA, 20 nt, synthetic construct
  misc_feature 1..20: note = source = /note="Description of Artificial Sequence: Synthetic oligonucleotide"
  source 1..20: mol_type = other RNA
gacgggttagaggatccgtg

SEQ ID NO: 7278 - RNA, 20 nt, synthetic construct
  misc_feature 1..20: note = source = /note="Description of Artificial Sequence: Synthetic oligonucleotide"
  source 1..20: mol_type = other RNA
agtcaggacgggttagagga

SEQ ID NO: 7279 - RNA, 20 nt, synthetic construct
  misc_feature 1..20: note = source = /note="Description of Artificial Sequence: Synthetic oligonucleotide"
  source 1..20: mol_type = other RNA
gtcagaacaagtccacgaat

SEQ ID NO: 7280 - RNA, 20 nt, synthetic construct
  misc_feature 1..20: note = source = /note="Description of Artificial Sequence: Synthetic oligonucleotide"
  source 1..20: mol_type = other RNA
tttcaggaggtcagaacaag

SEQ ID NO: 7281 - RNA, 20 nt, synthetic construct
  misc_feature 1..20: note = source = /note="Description of Artificial Sequence: Synthetic oligonucleotide"
  source 1..20: mol_type = other RNA
aggttatcggtcagttacgg

SEQ ID NO: 7282 - RNA, 20 nt, synthetic construct
  misc_feature 1..20: note = source = /note="Description of Artificial Sequence: Synthetic oligonucleotide"
  source 1..20: mol_type = other RNA
agcctacggacggagtgtct

SEQ ID NO: 7283 - RNA, 20 nt, synthetic construct
  misc_feature 1..20: note = source = /note="Description of Artificial Sequence: Synthetic oligonucleotide"
  source 1..20: mol_type = other RNA
aagcctacggacggagtgtc

SEQ ID NO: 7284 - RNA, 20 nt, synthetic construct
  misc_feature 1..20: note = source = /note="Description of Artificial Sequence: Synthetic oligonucleotide"
  source 1..20: mol_type = other RNA
tacagttctttcggtcataa

SEQ ID NO: 7285 - RNA, 20 nt, synthetic construct
  misc_feature 1..20: note = source = /note="Description of Artificial Sequence: Synthetic oligonucleotide"
  source 1..20: mol_type = other RNA
acacgtcactctcgggaaca

SEQ ID NO: 7286 - RNA, 20 nt, synthetic construct
  misc_feature 1..20: note = source = /note="Description of Artificial Sequence: Synthetic oligonucleotide"
  source 1..20: mol_type = other RNA
tcctgtctagagaggatagt

SEQ ID NO: 7287 - RNA, 20 nt, synthetic construct
  misc_feature 1..20: note = source = /note="Description of Artificial Sequence: Synthetic oligonucleotide"
  source 1..20: mol_type = other RNA
ttcctgtctagagaggatag

SEQ ID NO: 7288 - RNA, 20 nt, synthetic construct
  misc_feature 1..20: note = source = /note="Description of Artificial Sequence: Synthetic oligonucleotide"
  source 1..20: mol_type = other RNA
gataccactatcttctttat

SEQ ID NO: 7289 - RNA, 20 nt, synthetic construct
  misc_feature 1..20: note = source = /note="Description of Artificial Sequence: Synthetic oligonucleotide"
  source 1..20: mol_type = other RNA
tccgtttcgacttcatcgat

SEQ ID NO: 7290 - RNA, 20 nt, synthetic construct
  misc_feature 1..20: note = source = /note="Description of Artificial Sequence: Synthetic oligonucleotide"
  source 1..20: mol_type = other RNA
ctgacaccccacctgagtcg

SEQ ID NO: 7291 - RNA, 20 nt, synthetic construct
  misc_feature 1..20: note = source = /note="Description of Artificial Sequence: Synthetic oligonucleotide"
  source 1..20: mol_type = other RNA
tcgtctttctctgacacccc

SEQ ID NO: 7292 - RNA, 20 nt, synthetic construct
  misc_feature 1..20: note = source = /note="Description of Artificial Sequence: Synthetic oligonucleotide"
  source 1..20: mol_type = other RNA
gggtcgtctttctctgacac

SEQ ID NO: 7293 - RNA, 20 nt, synthetic construct
  misc_feature 1..20: note = source = /note="Description of Artificial Sequence: Synthetic oligonucleotide"
  source 1..20: mol_type = other RNA
ggggtcgtctttctctgaca

SEQ ID NO: 7294 - RNA, 20 nt, synthetic construct
  misc_feature 1..20: note = source = /note="Description of Artificial Sequence: Synthetic oligonucleotide"
  source 1..20: mol_type = other RNA
cggggtcgtctttctctgac

SEQ ID NO: 7295 - RNA, 20 nt, synthetic construct
  misc_feature 1..20: note = source = /note="Description of Artificial Sequence: Synthetic oligonucleotide"
  source 1..20: mol_type = other RNA
ctaagaatgacaggtcccgt

SEQ ID NO: 7296 - RNA, 20 nt, synthetic construct
  misc_feature 1..20: note = source = /note="Description of Artificial Sequence: Synthetic oligonucleotide"
  source 1..20: mol_type = other RNA
atgctctaagaatgacaggt

SEQ ID NO: 7297 - RNA, 20 nt, synthetic construct
  misc_feature 1..20: note = source = /note="Description of Artificial Sequence: Synthetic oligonucleotide"
  source 1..20: mol_type = other RNA
catgctctaagaatgacagg

SEQ ID NO: 7298 - RNA, 20 nt, synthetic construct
  misc_feature 1..20: note = source = /note="Description of Artificial Sequence: Synthetic oligonucleotide"
  source 1..20: mol_type = other RNA
ttgcagaagttgtttaggct

SEQ ID NO: 7299 - RNA, 20 nt, synthetic construct
  misc_feature 1..20: note = source = /note="Description of Artificial Sequence: Synthetic oligonucleotide"
  source 1..20: mol_type = other RNA
aaaaattgcagaagttgttt

SEQ ID NO: 7300 - RNA, 20 nt, synthetic construct
  misc_feature 1..20: note = source = /note="Description of Artificial Sequence: Synthetic oligonucleotide"
  source 1..20: mol_type = other RNA
tccttactggaacactgtct

SEQ ID NO: 7301 - RNA, 20 nt, synthetic construct
  misc_feature 1..20: note = source = /note="Description of Artificial Sequence: Synthetic oligonucleotide"
  source 1..20: mol_type = other RNA
tgtgagctggttgtccttac

SEQ ID NO: 7302 - RNA, 20 nt, synthetic construct
  misc_feature 1..20: note = source = /note="Description of Artificial Sequence: Synthetic oligonucleotide"
  source 1..20: mol_type = other RNA
tagaatggataattgtgagc

SEQ ID NO: 7303 - RNA, 20 nt, synthetic construct
  misc_feature 1..20: note = source = /note="Description of Artificial Sequence: Synthetic oligonucleotide"
  source 1..20: mol_type = other RNA
gttgactcccattattagaa

SEQ ID NO: 7304 - RNA, 20 nt, synthetic construct
  misc_feature 1..20: note = source = /note="Description of Artificial Sequence: Synthetic oligonucleotide"
  source 1..20: mol_type = other RNA
tggtttgatcacacatgact

SEQ ID NO: 7305 - RNA, 20 nt, synthetic construct
  misc_feature 1..20: note = source = /note="Description of Artificial Sequence: Synthetic oligonucleotide"
  source 1..20: mol_type = other RNA
tttgaatttgggcttaaagg

SEQ ID NO: 7306 - RNA, 20 nt, synthetic construct
  misc_feature 1..20: note = source = /note="Description of Artificial Sequence: Synthetic oligonucleotide"
  source 1..20: mol_type = other RNA
tggaattgttttttgaattt

SEQ ID NO: 7307 - RNA, 20 nt, synthetic construct
  misc_feature 1..20: note = source = /note="Description of Artificial Sequence: Synthetic oligonucleotide"
  source 1..20: mol_type = other RNA
ctggaattgttttttgaatt

SEQ ID NO: 7308 - RNA, 20 nt, synthetic construct
  misc_feature 1..20: note = source = /note="Description of Artificial Sequence: Synthetic oligonucleotide"
  source 1..20: mol_type = other RNA
taggtgaatagacaatatcc

SEQ ID NO: 7309 - RNA, 20 nt, synthetic construct
  misc_feature 1..20: note = source = /note="Description of Artificial Sequence: Synthetic oligonucleotide"
  source 1..20: mol_type = other RNA
ttaaccaaccagtttcttat

SEQ ID NO: 7310 - RNA, 20 nt, synthetic construct
  misc_feature 1..20: note = source = /note="Description of Artificial Sequence: Synthetic oligonucleotide"
  source 1..20: mol_type = other RNA
agagatctgcatttaagatc

SEQ ID NO: 7311 - RNA, 20 nt, synthetic construct
  misc_feature 1..20: note = source = /note="Description of Artificial Sequence: Synthetic oligonucleotide"
  source 1..20: mol_type = other RNA
ggaatgccattgaagatgag

SEQ ID NO: 7312 - RNA, 20 nt, synthetic construct
  misc_feature 1..20: note = source = /note="Description of Artificial Sequence: Synthetic oligonucleotide"
  source 1..20: mol_type = other RNA
tttgagggagaaaaattcag

SEQ ID NO: 7313 - RNA, 20 nt, synthetic construct
  misc_feature 1..20: note = source = /note="Description of Artificial Sequence: Synthetic oligonucleotide"
  source 1..20: mol_type = other RNA
ataatatatagattatttga

SEQ ID NO: 7314 - RNA, 20 nt, synthetic construct
  misc_feature 1..20: note = source = /note="Description of Artificial Sequence: Synthetic oligonucleotide"
  source 1..20: mol_type = other RNA
aataatatatagattatttg

SEQ ID NO: 7315 - RNA, 20 nt, synthetic construct
  misc_feature 1..20: note = source = /note="Description of Artificial Sequence: Synthetic oligonucleotide"
  source 1..20: mol_type = other RNA
ttaaaatctgtttcttaaaa

SEQ ID NO: 7316 - RNA, 20 nt, synthetic construct
  misc_feature 1..20: note = source = /note="Description of Artificial Sequence: Synthetic oligonucleotide"
  source 1..20: mol_type = other RNA
gtttttcataatcctcagta

SEQ ID NO: 7317 - RNA, 20 nt, synthetic construct
  misc_feature 1..20: note = source = /note="Description of Artificial Sequence: Synthetic oligonucleotide"
  source 1..20: mol_type = other RNA
ggtttttcataatcctcagt

SEQ ID NO: 7318 - RNA, 20 nt, synthetic construct
  misc_feature 1..20: note = source = /note="Description of Artificial Sequence: Synthetic oligonucleotide"
  source 1..20: mol_type = other RNA
tgtgcataggaggttttgtc

SEQ ID NO: 7319 - RNA, 20 nt, synthetic construct
  misc_feature 1..20: note = source = /note="Description of Artificial Sequence: Synthetic oligonucleotide"
  source 1..20: mol_type = other RNA
atctaaatcatgtgcatagg

SEQ ID NO: 7320 - RNA, 20 nt, synthetic construct
  misc_feature 1..20: note = source = /note="Description of Artificial Sequence: Synthetic oligonucleotide"
  source 1..20: mol_type = other RNA
ctaatctaaatcatgtgcat

SEQ ID NO: 7321 - RNA, 20 nt, synthetic construct
  misc_feature 1..20: note = source = /note="Description of Artificial Sequence: Synthetic oligonucleotide"
  source 1..20: mol_type = other RNA
atttctgaaaaggtgttaat

SEQ ID NO: 7322 - RNA, 20 nt, synthetic construct
  misc_feature 1..20: note = source = /note="Description of Artificial Sequence: Synthetic oligonucleotide"
  source 1..20: mol_type = other RNA
aagttcctccatttctgaaa

SEQ ID NO: 7323 - RNA, 20 nt, synthetic construct
  misc_feature 1..20: note = source = /note="Description of Artificial Sequence: Synthetic oligonucleotide"
  source 1..20: mol_type = other RNA
tttttatttttttttctttt

SEQ ID NO: 7324 - RNA, 20 nt, synthetic construct
  misc_feature 1..20: note = source = /note="Description of Artificial Sequence: Synthetic oligonucleotide"
  source 1..20: mol_type = other RNA
cacccacgtcgcgtggtcgt

SEQ ID NO: 7325 - RNA, 20 nt, synthetic construct
  misc_feature 1..20: note = source = /note="Description of Artificial Sequence: Synthetic oligonucleotide"
  source 1..20: mol_type = other RNA
tacgatctactgctcaatca

SEQ ID NO: 7326 - RNA, 20 nt, synthetic construct
  misc_feature 1..20: note = source = /note="Description of Artificial Sequence: Synthetic oligonucleotide"
  source 1..20: mol_type = other RNA
ttacgatctactgctcaatc

SEQ ID NO: 7327 - RNA, 20 nt, synthetic construct
  misc_feature 1..20: note = source = /note="Description of Artificial Sequence: Synthetic oligonucleotide"
  source 1..20: mol_type = other RNA
ctgccccctccctatcgtaa

SEQ ID NO: 7328 - RNA, 20 nt, synthetic construct
  misc_feature 1..20: note = source = /note="Description of Artificial Sequence: Synthetic oligonucleotide"
  source 1..20: mol_type = other RNA
cctgccccctccctatcgta

SEQ ID NO: 7329 - RNA, 20 nt, synthetic construct
  misc_feature 1..20: note = source = /note="Description of Artificial Sequence: Synthetic oligonucleotide"
  source 1..20: mol_type = other RNA
accccacccccctgccccct

SEQ ID NO: 7330 - RNA, 20 nt, synthetic construct
  misc_feature 1..20: note = source = /note="Description of Artificial Sequence: Synthetic oligonucleotide"
  source 1..20: mol_type = other RNA
caccccacccccctgccccc

SEQ ID NO: 7331 - RNA, 20 nt, synthetic construct
  misc_feature 1..20: note = source = /note="Description of Artificial Sequence: Synthetic oligonucleotide"
  source 1..20: mol_type = other RNA
caacaccccacccccctgcc

SEQ ID NO: 7332 - RNA, 20 nt, synthetic construct
  misc_feature 1..20: note = source = /note="Description of Artificial Sequence: Synthetic oligonucleotide"
  source 1..20: mol_type = other RNA
acaacaccccacccccctgc

SEQ ID NO: 7333 - RNA, 20 nt, synthetic construct
  misc_feature 1..20: note = source = /note="Description of Artificial Sequence: Synthetic oligonucleotide"
  source 1..20: mol_type = other RNA
gacaacaccccacccccctg

SEQ ID NO: 7334 - RNA, 20 nt, synthetic construct
  misc_feature 1..20: note = source = /note="Description of Artificial Sequence: Synthetic oligonucleotide"
  source 1..20: mol_type = other RNA
tgacaacaccccacccccct

SEQ ID NO: 7335 - RNA, 20 nt, synthetic construct
  misc_feature 1..20: note = source = /note="Description of Artificial Sequence: Synthetic oligonucleotide"
  source 1..20: mol_type = other RNA
cccctgacaacaccccaccc

SEQ ID NO: 7336 - RNA, 20 nt, synthetic construct
  misc_feature 1..20: note = source = /note="Description of Artificial Sequence: Synthetic oligonucleotide"
  source 1..20: mol_type = other RNA
acccctgacaacaccccacc

SEQ ID NO: 7337 - RNA, 20 nt, synthetic construct
  misc_feature 1..20: note = source = /note="Description of Artificial Sequence: Synthetic oligonucleotide"
  source 1..20: mol_type = other RNA
gacccctgacaacaccccac

SEQ ID NO: 7338 - RNA, 20 nt, synthetic construct
  misc_feature 1..20: note = source = /note="Description of Artificial Sequence: Synthetic oligonucleotide"
  source 1..20: mol_type = other RNA
agacccctgacaacacccca

SEQ ID NO: 7339 - RNA, 20 nt, synthetic construct
  misc_feature 1..20: note = source = /note="Description of Artificial Sequence: Synthetic oligonucleotide"
  source 1..20: mol_type = other RNA
gagacccctgacaacacccc

SEQ ID NO: 7340 - RNA, 20 nt, synthetic construct
  misc_feature 1..20: note = source = /note="Description of Artificial Sequence: Synthetic oligonucleotide"
  source 1..20: mol_type = other RNA
tgtgagacccctgacaacac

SEQ ID NO: 7341 - RNA, 20 nt, synthetic construct
  misc_feature 1..20: note = source = /note="Description of Artificial Sequence: Synthetic oligonucleotide"
  source 1..20: mol_type = other RNA
gtgtgagacccctgacaaca

SEQ ID NO: 7342 - RNA, 20 nt, synthetic construct
  misc_feature 1..20: note = source = /note="Description of Artificial Sequence: Synthetic oligonucleotide"
  source 1..20: mol_type = other RNA
agtgtgagacccctgacaac

SEQ ID NO: 7343 - RNA, 20 nt, synthetic construct
  misc_feature 1..20: note = source = /note="Description of Artificial Sequence: Synthetic oligonucleotide"
  source 1..20: mol_type = other RNA
ttccccttgtagtgtgagac

SEQ ID NO: 7344 - RNA, 20 nt, synthetic construct
  misc_feature 1..20: note = source = /note="Description of Artificial Sequence: Synthetic oligonucleotide"
  source 1..20: mol_type = other RNA
cttccccttgtagtgtgaga

SEQ ID NO: 7345 - RNA, 20 nt, synthetic construct
  misc_feature 1..20: note = source = /note="Description of Artificial Sequence: Synthetic oligonucleotide"
  source 1..20: mol_type = other RNA
ccttccccttgtagtgtgag

SEQ ID NO: 7346 - RNA, 20 nt, synthetic construct
  misc_feature 1..20: note = source = /note="Description of Artificial Sequence: Synthetic oligonucleotide"
  source 1..20: mol_type = other RNA
cttgtgtacctgtgtccttc

SEQ ID NO: 7347 - RNA, 20 nt, synthetic construct
  misc_feature 1..20: note = source = /note="Description of Artificial Sequence: Synthetic oligonucleotide"
  source 1..20: mol_type = other RNA
tcttgtgtacctgtgtcctt

SEQ ID NO: 7348 - RNA, 20 nt, synthetic construct
  misc_feature 1..20: note = source = /note="Description of Artificial Sequence: Synthetic oligonucleotide"
  source 1..20: mol_type = other RNA
ctcttgtgtacctgtgtcct

SEQ ID NO: 7349 - RNA, 20 nt, synthetic construct
  misc_feature 1..20: note = source = /note="Description of Artificial Sequence: Synthetic oligonucleotide"
  source 1..20: mol_type = other RNA
gttactcttgtgtacctgtg

SEQ ID NO: 7350 - RNA, 20 nt, synthetic construct
  misc_feature 1..20: note = source = /note="Description of Artificial Sequence: Synthetic oligonucleotide"
  source 1..20: mol_type = other RNA
ttaacttgttactcttgtgt

SEQ ID NO: 7351 - RNA, 20 nt, synthetic construct
  misc_feature 1..20: note = source = /note="Description of Artificial Sequence: Synthetic oligonucleotide"
  source 1..20: mol_type = other RNA
cgtataagagtgagtatcca

SEQ ID NO: 7352 - RNA, 20 nt, synthetic construct
  misc_feature 1..20: note = source = /note="Description of Artificial Sequence: Synthetic oligonucleotide"
  source 1..20: mol_type = other RNA
gcgtataagagtgagtatcc

SEQ ID NO: 7353 - RNA, 20 nt, synthetic construct
  misc_feature 1..20: note = source = /note="Description of Artificial Sequence: Synthetic oligonucleotide"
  source 1..20: mol_type = other RNA
gtggcgtataagagtgagta

SEQ ID NO: 7354 - RNA, 20 nt, synthetic construct
  misc_feature 1..20: note = source = /note="Description of Artificial Sequence: Synthetic oligonucleotide"
  source 1..20: mol_type = other RNA
acatccctgtacctacttta

SEQ ID NO: 7355 - RNA, 20 nt, synthetic construct
  misc_feature 1..20: note = source = /note="Description of Artificial Sequence: Synthetic oligonucleotide"
  source 1..20: mol_type = other RNA
agtacaggaaacatccctgt

SEQ ID NO: 7356 - RNA, 20 nt, synthetic construct
  misc_feature 1..20: note = source = /note="Description of Artificial Sequence: Synthetic oligonucleotide"
  source 1..20: mol_type = other RNA
tactcaagtacaggaaacat

SEQ ID NO: 7357 - RNA, 20 nt, synthetic construct
  misc_feature 1..20: note = source = /note="Description of Artificial Sequence: Synthetic oligonucleotide"
  source 1..20: mol_type = other RNA
ctactcaagtacaggaaaca

SEQ ID NO: 7358 - RNA, 20 nt, synthetic construct
  misc_feature 1..20: note = source = /note="Description of Artificial Sequence: Synthetic oligonucleotide"
  source 1..20: mol_type = other RNA
ttacaccgtgtatatgtggt

SEQ ID NO: 7359 - RNA, 20 nt, synthetic construct
  misc_feature 1..20: note = source = /note="Description of Artificial Sequence: Synthetic oligonucleotide"
  source 1..20: mol_type = other RNA
atctgacctaattcttttac

SEQ ID NO: 7360 - RNA, 20 nt, synthetic construct
  misc_feature 1..20: note = source = /note="Description of Artificial Sequence: Synthetic oligonucleotide"
  source 1..20: mol_type = other RNA
ttacaggttgttactatctg

SEQ ID NO: 7361 - RNA, 20 nt, synthetic construct
  misc_feature 1..20: note = source = /note="Description of Artificial Sequence: Synthetic oligonucleotide"
  source 1..20: mol_type = other RNA
ataagtgttatcgtttctga

SEQ ID NO: 7362 - RNA, 20 nt, synthetic construct
  misc_feature 1..20: note = source = /note="Description of Artificial Sequence: Synthetic oligonucleotide"
  source 1..20: mol_type = other RNA
tacgtgtgcatacaaataac

SEQ ID NO: 7363 - RNA, 20 nt, synthetic construct
  misc_feature 1..20: note = source = /note="Description of Artificial Sequence: Synthetic oligonucleotide"
  source 1..20: mol_type = other RNA
taatgacccaaatatgggtt

SEQ ID NO: 7364 - RNA, 20 nt, synthetic construct
  misc_feature 1..20: note = source = /note="Description of Artificial Sequence: Synthetic oligonucleotide"
  source 1..20: mol_type = other RNA
ctgactcggtagggtaatga

SEQ ID NO: 7365 - RNA, 20 nt, synthetic construct
  misc_feature 1..20: note = source = /note="Description of Artificial Sequence: Synthetic oligonucleotide"
  source 1..20: mol_type = other RNA
actgactcggtagggtaatg

SEQ ID NO: 7366 - RNA, 20 nt, synthetic construct
  misc_feature 1..20: note = source = /note="Description of Artificial Sequence: Synthetic oligonucleotide"
  source 1..20: mol_type = other RNA
cagtcacaccgctaaggagt

SEQ ID NO: 7367 - RNA, 20 nt, synthetic construct
  misc_feature 1..20: note = source = /note="Description of Artificial Sequence: Synthetic oligonucleotide"
  source 1..20: mol_type = other RNA
tcagtcacaccgctaaggag

SEQ ID NO: 7368 - RNA, 20 nt, synthetic construct
  misc_feature 1..20: note = source = /note="Description of Artificial Sequence: Synthetic oligonucleotide"
  source 1..20: mol_type = other RNA
ttggtaacaccttcagtcac

SEQ ID NO: 7369 - RNA, 20 nt, synthetic construct
  misc_feature 1..20: note = source = /note="Description of Artificial Sequence: Synthetic oligonucleotide"
  source 1..20: mol_type = other RNA
catttgatcaagttggtaac

SEQ ID NO: 7370 - RNA, 20 nt, synthetic construct
  misc_feature 1..20: note = source = /note="Description of Artificial Sequence: Synthetic oligonucleotide"
  source 1..20: mol_type = other RNA
ttgtgaaaatgcgacaacca

SEQ ID NO: 7371 - RNA, 20 nt, synthetic construct
  misc_feature 1..20: note = source = /note="Description of Artificial Sequence: Synthetic oligonucleotide"
  source 1..20: mol_type = other RNA
cttgtgaaaatgcgacaacc

SEQ ID NO: 7372 - RNA, 20 nt, synthetic construct
  misc_feature 1..20: note = source = /note="Description of Artificial Sequence: Synthetic oligonucleotide"
  source 1..20: mol_type = other RNA
atccttgtgaaaatgcgaca

SEQ ID NO: 7373 - RNA, 20 nt, synthetic construct
  misc_feature 1..20: note = source = /note="Description of Artificial Sequence: Synthetic oligonucleotide"
  source 1..20: mol_type = other RNA
acctctcctacacctcttta

SEQ ID NO: 7374 - RNA, 20 nt, synthetic construct
  misc_feature 1..20: note = source = /note="Description of Artificial Sequence: Synthetic oligonucleotide"
  source 1..20: mol_type = other RNA
ttgttcacgacctctcctac

SEQ ID NO: 7375 - RNA, 20 nt, synthetic construct
  misc_feature 1..20: note = source = /note="Description of Artificial Sequence: Synthetic oligonucleotide"
  source 1..20: mol_type = other RNA
cctgtgttgttcacgacctc

SEQ ID NO: 7376 - RNA, 20 nt, synthetic construct
  misc_feature 1..20: note = source = /note="Description of Artificial Sequence: Synthetic oligonucleotide"
  source 1..20: mol_type = other RNA
tcactcctgtgttgttcacg

SEQ ID NO: 7377 - RNA, 20 nt, synthetic construct
  misc_feature 1..20: note = source = /note="Description of Artificial Sequence: Synthetic oligonucleotide"
  source 1..20: mol_type = other RNA
taccgctagtaatttttcac

SEQ ID NO: 7378 - RNA, 20 nt, synthetic construct
  misc_feature 1..20: note = source = /note="Description of Artificial Sequence: Synthetic oligonucleotide"
  source 1..20: mol_type = other RNA
agtagagtgtggtcaatctt

SEQ ID NO: 7379 - RNA, 20 nt, synthetic construct
  misc_feature 1..20: note = source = /note="Description of Artificial Sequence: Synthetic oligonucleotide"
  source 1..20: mol_type = other RNA
cttttttacgagtggtagtg

SEQ ID NO: 7380 - RNA, 20 nt, synthetic construct
  misc_feature 1..20: note = source = /note="Description of Artificial Sequence: Synthetic oligonucleotide"
  source 1..20: mol_type = other RNA
tttgttagggtagtttttca

SEQ ID NO: 7381 - RNA, 20 nt, synthetic construct
  misc_feature 1..20: note = source = /note="Description of Artificial Sequence: Synthetic oligonucleotide"
  source 1..20: mol_type = other RNA
gtttgttagggtagtttttc

SEQ ID NO: 7382 - RNA, 20 nt, synthetic construct
  misc_feature 1..20: note = source = /note="Description of Artificial Sequence: Synthetic oligonucleotide"
  source 1..20: mol_type = other RNA
gttggatgagtagactgttt

SEQ ID NO: 7383 - RNA, 20 nt, synthetic construct
  misc_feature 1..20: note = source = /note="Description of Artificial Sequence: Synthetic oligonucleotide"
  source 1..20: mol_type = other RNA
cgttggatgagtagactgtt

SEQ ID NO: 7384 - RNA, 20 nt, synthetic construct
  misc_feature 1..20: note = source = /note="Description of Artificial Sequence: Synthetic oligonucleotide"
  source 1..20: mol_type = other RNA
acttgtccgttgggtgtttt

SEQ ID NO: 7385 - RNA, 20 nt, synthetic construct
  misc_feature 1..20: note = source = /note="Description of Artificial Sequence: Synthetic oligonucleotide"
  source 1..20: mol_type = other RNA
cttgatggtagtctcacttg

SEQ ID NO: 7386 - RNA, 20 nt, synthetic construct
  misc_feature 1..20: note = source = /note="Description of Artificial Sequence: Synthetic oligonucleotide"
  source 1..20: mol_type = other RNA
ttctcgaagacgtgtcgttt

SEQ ID NO: 7387 - RNA, 20 nt, synthetic construct
  misc_feature 1..20: note = source = /note="Description of Artificial Sequence: Synthetic oligonucleotide"
  source 1..20: mol_type = other RNA
ttttcggttttaactgttta

SEQ ID NO: 7388 - RNA, 20 nt, synthetic construct
  misc_feature 1..20: note = source = /note="Description of Artificial Sequence: Synthetic oligonucleotide"
  source 1..20: mol_type = other RNA
gttttcggttttaactgttt

SEQ ID NO: 7389 - RNA, 20 nt, synthetic construct
  misc_feature 1..20: note = source = /note="Description of Artificial Sequence: Synthetic oligonucleotide"
  source 1..20: mol_type = other RNA
cagattttgtggttttcgtt

SEQ ID NO: 7390 - RNA, 20 nt, synthetic construct
  misc_feature 1..20: note = source = /note="Description of Artificial Sequence: Synthetic oligonucleotide"
  source 1..20: mol_type = other RNA
agtgctgtatccgtgcccgt

SEQ ID NO: 7391 - RNA, 20 nt, synthetic construct
  misc_feature 1..20: note = source = /note="Description of Artificial Sequence: Synthetic oligonucleotide"
  source 1..20: mol_type = other RNA
tggtaagtgctgtatccgtg

SEQ ID NO: 7392 - RNA, 20 nt, synthetic construct
  misc_feature 1..20: note = source = /note="Description of Artificial Sequence: Synthetic oligonucleotide"
  source 1..20: mol_type = other RNA
gtggtaagtgctgtatccgt

SEQ ID NO: 7393 - RNA, 20 nt, synthetic construct
  misc_feature 1..20: note = source = /note="Description of Artificial Sequence: Synthetic oligonucleotide"
  source 1..20: mol_type = other RNA
ccgttgtggtaagtgctgta

SEQ ID NO: 7394 - RNA, 20 nt, synthetic construct
  misc_feature 1..20: note = source = /note="Description of Artificial Sequence: Synthetic oligonucleotide"
  source 1..20: mol_type = other RNA
ttttgggatcttcttttgga

SEQ ID NO: 7395 - RNA, 20 nt, synthetic construct
  misc_feature 1..20: note = source = /note="Description of Artificial Sequence: Synthetic oligonucleotide"
  source 1..20: mol_type = other RNA
tatgtttttagttaagttct

SEQ ID NO: 7396 - RNA, 20 nt, synthetic construct
  misc_feature 1..20: note = source = /note="Description of Artificial Sequence: Synthetic oligonucleotide"
  source 1..20: mol_type = other RNA
gtatacacctttcgactttg

SEQ ID NO: 7397 - RNA, 20 nt, synthetic construct
  misc_feature 1..20: note = source = /note="Description of Artificial Sequence: Synthetic oligonucleotide"
  source 1..20: mol_type = other RNA
cttttgaccgatcggtatac

SEQ ID NO: 7398 - RNA, 20 nt, synthetic construct
  misc_feature 1..20: note = source = /note="Description of Artificial Sequence: Synthetic oligonucleotide"
  source 1..20: mol_type = other RNA
tatttaccacgacccttttg

SEQ ID NO: 7399 - RNA, 20 nt, synthetic construct
  misc_feature 1..20: note = source = /note="Description of Artificial Sequence: Synthetic oligonucleotide"
  source 1..20: mol_type = other RNA
ggataaattatttaccacga

SEQ ID NO: 7400 - RNA, 20 nt, synthetic construct
  misc_feature 1..20: note = source = /note="Description of Artificial Sequence: Synthetic oligonucleotide"
  source 1..20: mol_type = other RNA
gggataaattatttaccacg

SEQ ID NO: 7401 - RNA, 20 nt, synthetic construct
  misc_feature 1..20: note = source = /note="Description of Artificial Sequence: Synthetic oligonucleotide"
  source 1..20: mol_type = other RNA
tcctaagggataaattattt

SEQ ID NO: 7402 - RNA, 20 nt, synthetic construct
  misc_feature 1..20: note = source = /note="Description of Artificial Sequence: Synthetic oligonucleotide"
  source 1..20: mol_type = other RNA
ctttttgttctttacccctt

SEQ ID NO: 7403 - RNA, 20 nt, synthetic construct
  misc_feature 1..20: note = source = /note="Description of Artificial Sequence: Synthetic oligonucleotide"
  source 1..20: mol_type = other RNA
ggactctttttgttctttac

SEQ ID NO: 7404 - RNA, 20 nt, synthetic construct
  misc_feature 1..20: note = source = /note="Description of Artificial Sequence: Synthetic oligonucleotide"
  source 1..20: mol_type = other RNA
tggactctttttgttcttta

SEQ ID NO: 7405 - RNA, 20 nt, synthetic construct
  misc_feature 1..20: note = source = /note="Description of Artificial Sequence: Synthetic oligonucleotide"
  source 1..20: mol_type = other RNA
ttggactctttttgttcttt

SEQ ID NO: 7406 - RNA, 20 nt, synthetic construct
  misc_feature 1..20: note = source = /note="Description of Artificial Sequence: Synthetic oligonucleotide"
  source 1..20: mol_type = other RNA
cttgtctcgggagtctttat

SEQ ID NO: 7407 - RNA, 20 nt, synthetic construct
  misc_feature 1..20: note = source = /note="Description of Artificial Sequence: Synthetic oligonucleotide"
  source 1..20: mol_type = other RNA
ttttgtctctatatctagtt

SEQ ID NO: 7408 - RNA, 20 nt, synthetic construct
  misc_feature 1..20: note = source = /note="Description of Artificial Sequence: Synthetic oligonucleotide"
  source 1..20: mol_type = other RNA
gctgagcatggtccaccacg

SEQ ID NO: 7409 - RNA, 20 nt, synthetic construct
  misc_feature 1..20: note = source = /note="Description of Artificial Sequence: Synthetic oligonucleotide"
  source 1..20: mol_type = other RNA
aggactgctgagcatggtcc

SEQ ID NO: 7410 - RNA, 20 nt, synthetic construct
  misc_feature 1..20: note = source = /note="Description of Artificial Sequence: Synthetic oligonucleotide"
  source 1..20: mol_type = other RNA
tgaaaaaggactgctgagca

SEQ ID NO: 7411 - RNA, 20 nt, synthetic construct
  misc_feature 1..20: note = source = /note="Description of Artificial Sequence: Synthetic oligonucleotide"
  source 1..20: mol_type = other RNA
tacttcacatctcttgaaaa

SEQ ID NO: 7412 - RNA, 20 nt, synthetic construct
  misc_feature 1..20: note = source = /note="Description of Artificial Sequence: Synthetic oligonucleotide"
  source 1..20: mol_type = other RNA
aaggtgaattaatattttta

SEQ ID NO: 7413 - RNA, 20 nt, synthetic construct
  misc_feature 1..20: note = source = /note="Description of Artificial Sequence: Synthetic oligonucleotide"
  source 1..20: mol_type = other RNA
gattaagtatggagaatata

SEQ ID NO: 7414 - RNA, 20 nt, synthetic construct
  misc_feature 1..20: note = source = /note="Description of Artificial Sequence: Synthetic oligonucleotide"
  source 1..20: mol_type = other RNA
tttcctatatggattaagta

SEQ ID NO: 7415 - RNA, 20 nt, synthetic construct
  misc_feature 1..20: note = source = /note="Description of Artificial Sequence: Synthetic oligonucleotide"
  source 1..20: mol_type = other RNA
ggaatataatgtttcctata

SEQ ID NO: 7416 - RNA, 20 nt, synthetic construct
  misc_feature 1..20: note = source = /note="Description of Artificial Sequence: Synthetic oligonucleotide"
  source 1..20: mol_type = other RNA
agcaagccacatgttagacc

SEQ ID NO: 7417 - RNA, 20 nt, synthetic construct
  misc_feature 1..20: note = source = /note="Description of Artificial Sequence: Synthetic oligonucleotide"
  source 1..20: mol_type = other RNA
taaagaaagtgttttttata

SEQ ID NO: 7418 - RNA, 20 nt, synthetic construct
  misc_feature 1..20: note = source = /note="Description of Artificial Sequence: Synthetic oligonucleotide"
  source 1..20: mol_type = other RNA
gtaaagaaagtgttttttat

SEQ ID NO: 7419 - RNA, 20 nt, synthetic construct
  misc_feature 1..20: note = source = /note="Description of Artificial Sequence: Synthetic oligonucleotide"
  source 1..20: mol_type = other RNA
gttgccaagtctcactcttg

SEQ ID NO: 7420 - RNA, 20 nt, synthetic construct
  misc_feature 1..20: note = source = /note="Description of Artificial Sequence: Synthetic oligonucleotide"
  source 1..20: mol_type = other RNA
attactatgtaatattggta

SEQ ID NO: 7421 - RNA, 20 nt, synthetic construct
  misc_feature 1..20: note = source = /note="Description of Artificial Sequence: Synthetic oligonucleotide"
  source 1..20: mol_type = other RNA
ttaaaattactatgtaatat

SEQ ID NO: 7422 - RNA, 20 nt, synthetic construct
  misc_feature 1..20: note = source = /note="Description of Artificial Sequence: Synthetic oligonucleotide"
  source 1..20: mol_type = other RNA
tcaagatgtgtgcaatgcta

SEQ ID NO: 7423 - RNA, 20 nt, synthetic construct
  misc_feature 1..20: note = source = /note="Description of Artificial Sequence: Synthetic oligonucleotide"
  source 1..20: mol_type = other RNA
tggattcttcctatcaacat

SEQ ID NO: 7424 - RNA, 20 nt, synthetic construct
  misc_feature 1..20: note = source = /note="Description of Artificial Sequence: Synthetic oligonucleotide"
  source 1..20: mol_type = other RNA
ttggattcttcctatcaaca

SEQ ID NO: 7425 - RNA, 20 nt, synthetic construct
  misc_feature 1..20: note = source = /note="Description of Artificial Sequence: Synthetic oligonucleotide"
  source 1..20: mol_type = other RNA
attattctccaaaactattt

SEQ ID NO: 7426 - RNA, 20 nt, synthetic construct
  misc_feature 1..20: note = source = /note="Description of Artificial Sequence: Synthetic oligonucleotide"
  source 1..20: mol_type = other RNA
ggccacacctcctgcataga

SEQ ID NO: 7427 - RNA, 20 nt, synthetic construct
  misc_feature 1..20: note = source = /note="Description of Artificial Sequence: Synthetic oligonucleotide"
  source 1..20: mol_type = other RNA
ctgagtaaagatgatgtata

SEQ ID NO: 7428 - RNA, 20 nt, synthetic construct
  misc_feature 1..20: note = source = /note="Description of Artificial Sequence: Synthetic oligonucleotide"
  source 1..20: mol_type = other RNA
tattagtaattcagagtgtt

SEQ ID NO: 7429 - RNA, 20 nt, synthetic construct
  misc_feature 1..20: note = source = /note="Description of Artificial Sequence: Synthetic oligonucleotide"
  source 1..20: mol_type = other RNA
tctctgtcacttccactgac

SEQ ID NO: 7430 - RNA, 20 nt, synthetic construct
  misc_feature 1..20: note = source = /note="Description of Artificial Sequence: Synthetic oligonucleotide"
  source 1..20: mol_type = other RNA
tgtttcaggatcaaacttac

SEQ ID NO: 7431 - RNA, 20 nt, synthetic construct
  misc_feature 1..20: note = source = /note="Description of Artificial Sequence: Synthetic oligonucleotide"
  source 1..20: mol_type = other RNA
gtgtttcaggatcaaactta

SEQ ID NO: 7432 - RNA, 20 nt, synthetic construct
  misc_feature 1..20: note = source = /note="Description of Artificial Sequence: Synthetic oligonucleotide"
  source 1..20: mol_type = other RNA
tgctaaaggcactgtgtttc

SEQ ID NO: 7433 - RNA, 20 nt, synthetic construct
  misc_feature 1..20: note = source = /note="Description of Artificial Sequence: Synthetic oligonucleotide"
  source 1..20: mol_type = other RNA
atgggaactatatctgctaa

SEQ ID NO: 7434 - RNA, 20 nt, synthetic construct
  misc_feature 1..20: note = source = /note="Description of Artificial Sequence: Synthetic oligonucleotide"
  source 1..20: mol_type = other RNA
acttcagactgcttgcttat

SEQ ID NO: 7435 - RNA, 20 nt, synthetic construct
  misc_feature 1..20: note = source = /note="Description of Artificial Sequence: Synthetic oligonucleotide"
  source 1..20: mol_type = other RNA
tacttcagactgcttgctta

SEQ ID NO: 7436 - RNA, 20 nt, synthetic construct
  misc_feature 1..20: note = source = /note="Description of Artificial Sequence: Synthetic oligonucleotide"
  source 1..20: mol_type = other RNA
ttatacattcagattactga

SEQ ID NO: 7437 - RNA, 20 nt, synthetic construct
  misc_feature 1..20: note = source = /note="Description of Artificial Sequence: Synthetic oligonucleotide"
  source 1..20: mol_type = other RNA
tttatacattcagattactg

SEQ ID NO: 7438 - RNA, 20 nt, synthetic construct
  misc_feature 1..20: note = source = /note="Description of Artificial Sequence: Synthetic oligonucleotide"
  source 1..20: mol_type = other RNA
tgtatagttgccatactata

SEQ ID NO: 7439 - RNA, 20 nt, synthetic construct
  misc_feature 1..20: note = source = /note="Description of Artificial Sequence: Synthetic oligonucleotide"
  source 1..20: mol_type = other RNA
tatgtcagctttttttcaag

SEQ ID NO: 7440 - RNA, 20 nt, synthetic construct
  misc_feature 1..20: note = source = /note="Description of Artificial Sequence: Synthetic oligonucleotide"
  source 1..20: mol_type = other RNA
ttatgtcagctttttttcaa

SEQ ID NO: 7441 - RNA, 20 nt, synthetic construct
  misc_feature 1..20: note = source = /note="Description of Artificial Sequence: Synthetic oligonucleotide"
  source 1..20: mol_type = other RNA
tttatgtcagctttttttca

SEQ ID NO: 7442 - RNA, 20 nt, synthetic construct
  misc_feature 1..20: note = source = /note="Description of Artificial Sequence: Synthetic oligonucleotide"
  source 1..20: mol_type = other RNA
aaataacgaaaactaggtgg

SEQ ID NO: 7443 - RNA, 20 nt, synthetic construct
  misc_feature 1..20: note = source = /note="Description of Artificial Sequence: Synthetic oligonucleotide"
  source 1..20: mol_type = other RNA
caaataacgaaaactaggtg

SEQ ID NO: 7444 - RNA, 20 nt, synthetic construct
  misc_feature 1..20: note = source = /note="Description of Artificial Sequence: Synthetic oligonucleotide"
  source 1..20: mol_type = other RNA
ccaaataacgaaaactaggt

SEQ ID NO: 7445 - RNA, 20 nt, synthetic construct
  misc_feature 1..20: note = source = /note="Description of Artificial Sequence: Synthetic oligonucleotide"
  source 1..20: mol_type = other RNA
accaaataacgaaaactagg

SEQ ID NO: 7446 - RNA, 20 nt, synthetic construct
  misc_feature 1..20: note = source = /note="Description of Artificial Sequence: Synthetic oligonucleotide"
  source 1..20: mol_type = other RNA
aaaaccaaataacgaaaact

SEQ ID NO: 7447 - RNA, 20 nt, synthetic construct
  misc_feature 1..20: note = source = /note="Description of Artificial Sequence: Synthetic oligonucleotide"
  source 1..20: mol_type = other RNA
aaacaaaaacaaaataaaaa

SEQ ID NO: 7448 - RNA, 20 nt, synthetic construct
  misc_feature 1..20: note = source = /note="Description of Artificial Sequence: Synthetic oligonucleotide"
  source 1..20: mol_type = other RNA
tatgctcaaatttgtgaaga

SEQ ID NO: 7449 - RNA, 20 nt, synthetic construct
  misc_feature 1..20: note = source = /note="Description of Artificial Sequence: Synthetic oligonucleotide"
  source 1..20: mol_type = other RNA
atatgctcaaatttgtgaag

SEQ ID NO: 7450 - RNA, 20 nt, synthetic construct
  misc_feature 1..20: note = source = /note="Description of Artificial Sequence: Synthetic oligonucleotide"
  source 1..20: mol_type = other RNA
ctcttcggattactcaagaa

SEQ ID NO: 7451 - RNA, 20 nt, synthetic construct
  misc_feature 1..20: note = source = /note="Description of Artificial Sequence: Synthetic oligonucleotide"
  source 1..20: mol_type = other RNA
ctccataccatttgactctt

SEQ ID NO: 7452 - RNA, 20 nt, synthetic construct
  misc_feature 1..20: note = source = /note="Description of Artificial Sequence: Synthetic oligonucleotide"
  source 1..20: mol_type = other RNA
catttcaccaatatgcattt

SEQ ID NO: 7453 - RNA, 20 nt, synthetic construct
  misc_feature 1..20: note = source = /note="Description of Artificial Sequence: Synthetic oligonucleotide"
  source 1..20: mol_type = other RNA
atagcacattagtgtgcaaa

SEQ ID NO: 7454 - RNA, 20 nt, synthetic construct
  misc_feature 1..20: note = source = /note="Description of Artificial Sequence: Synthetic oligonucleotide"
  source 1..20: mol_type = other RNA
taatccatcataattatgac

SEQ ID NO: 7455 - RNA, 20 nt, synthetic construct
  misc_feature 1..20: note = source = /note="Description of Artificial Sequence: Synthetic oligonucleotide"
  source 1..20: mol_type = other RNA
gtgaaacaattactgcatct

SEQ ID NO: 7456 - RNA, 20 nt, synthetic construct
  misc_feature 1..20: note = source = /note="Description of Artificial Sequence: Synthetic oligonucleotide"
  source 1..20: mol_type = other RNA
attataaattctagtcgcat

SEQ ID NO: 7457 - RNA, 20 nt, synthetic construct
  misc_feature 1..20: note = source = /note="Description of Artificial Sequence: Synthetic oligonucleotide"
  source 1..20: mol_type = other RNA
tggtttcctaagaccaaaac

SEQ ID NO: 7458 - RNA, 20 nt, synthetic construct
  misc_feature 1..20: note = source = /note="Description of Artificial Sequence: Synthetic oligonucleotide"
  source 1..20: mol_type = other RNA
ttgactactagctaacattt

SEQ ID NO: 7459 - RNA, 20 nt, synthetic construct
  misc_feature 1..20: note = source = /note="Description of Artificial Sequence: Synthetic oligonucleotide"
  source 1..20: mol_type = other RNA
tttatctcagttgaaaatac

SEQ ID NO: 7460 - RNA, 20 nt, synthetic construct
  misc_feature 1..20: note = source = /note="Description of Artificial Sequence: Synthetic oligonucleotide"
  source 1..20: mol_type = other RNA
acctttatcttctatgtcag

SEQ ID NO: 7461 - RNA, 20 nt, synthetic construct
  misc_feature 1..20: note = source = /note="Description of Artificial Sequence: Synthetic oligonucleotide"
  source 1..20: mol_type = other RNA
tctctctctctctctctctc

SEQ ID NO: 7462 - RNA, 20 nt, synthetic construct
  misc_feature 1..20: note = source = /note="Description of Artificial Sequence: Synthetic oligonucleotide"
  source 1..20: mol_type = other RNA
agaaacatgcaacaattata

SEQ ID NO: 7463 - RNA, 20 nt, synthetic construct
  misc_feature 1..20: note = source = /note="Description of Artificial Sequence: Synthetic oligonucleotide"
  source 1..20: mol_type = other RNA
ctaaaggtcaaattataacc

SEQ ID NO: 7464 - RNA, 20 nt, synthetic construct
  misc_feature 1..20: note = source = /note="Description of Artificial Sequence: Synthetic oligonucleotide"
  source 1..20: mol_type = other RNA
atttttttcagaaattctaa

SEQ ID NO: 7465 - RNA, 20 nt, synthetic construct
  misc_feature 1..20: note = source = /note="Description of Artificial Sequence: Synthetic oligonucleotide"
  source 1..20: mol_type = other RNA
ttgtaatgcatgggcttcca

SEQ ID NO: 7466 - RNA, 20 nt, synthetic construct
  misc_feature 1..20: note = source = /note="Description of Artificial Sequence: Synthetic oligonucleotide"
  source 1..20: mol_type = other RNA
taatgttctttgtaatgcat

SEQ ID NO: 7467 - RNA, 20 nt, synthetic construct
  misc_feature 1..20: note = source = /note="Description of Artificial Sequence: Synthetic oligonucleotide"
  source 1..20: mol_type = other RNA
ctaatgttctttgtaatgca

SEQ ID NO: 7468 - RNA, 20 nt, synthetic construct
  misc_feature 1..20: note = source = /note="Description of Artificial Sequence: Synthetic oligonucleotide"
  source 1..20: mol_type = other RNA
aattaaattacaattttaaa

SEQ ID NO: 7469 - RNA, 20 nt, synthetic construct
  misc_feature 1..20: note = source = /note="Description of Artificial Sequence: Synthetic oligonucleotide"
  source 1..20: mol_type = other RNA
gtatttttttaagtctaaaa

SEQ ID NO: 7470 - RNA, 20 nt, synthetic construct
  misc_feature 1..20: note = source = /note="Description of Artificial Sequence: Synthetic oligonucleotide"
  source 1..20: mol_type = other RNA
tgctaaagttataagaactt

SEQ ID NO: 7471 - RNA, 20 nt, synthetic construct
  misc_feature 1..20: note = source = /note="Description of Artificial Sequence: Synthetic oligonucleotide"
  source 1..20: mol_type = other RNA
tcttcataggtttaccaaaa

SEQ ID NO: 7472 - RNA, 20 nt, synthetic construct
  misc_feature 1..20: note = source = /note="Description of Artificial Sequence: Synthetic oligonucleotide"
  source 1..20: mol_type = other RNA
gcagcatgagatttcttcat

SEQ ID NO: 7473 - RNA, 20 nt, synthetic construct
  misc_feature 1..20: note = source = /note="Description of Artificial Sequence: Synthetic oligonucleotide"
  source 1..20: mol_type = other RNA
tgtgtggattttttactata

SEQ ID NO: 7474 - RNA, 20 nt, synthetic construct
  misc_feature 1..20: note = source = /note="Description of Artificial Sequence: Synthetic oligonucleotide"
  source 1..20: mol_type = other RNA
ccttaacctaggaaaataca

SEQ ID NO: 7475 - RNA, 20 nt, synthetic construct
  misc_feature 1..20: note = source = /note="Description of Artificial Sequence: Synthetic oligonucleotide"
  source 1..20: mol_type = other RNA
gattattgaacccttaacct

SEQ ID NO: 7476 - RNA, 20 nt, synthetic construct
  misc_feature 1..20: note = source = /note="Description of Artificial Sequence: Synthetic oligonucleotide"
  source 1..20: mol_type = other RNA
tttcaaaaaaactagtgaga

SEQ ID NO: 7477 - RNA, 20 nt, synthetic construct
  misc_feature 1..20: note = source = /note="Description of Artificial Sequence: Synthetic oligonucleotide"
  source 1..20: mol_type = other RNA
ggaggagaaccagtgaccta

SEQ ID NO: 7478 - RNA, 20 nt, synthetic construct
  misc_feature 1..20: note = source = /note="Description of Artificial Sequence: Synthetic oligonucleotide"
  source 1..20: mol_type = other RNA
acctacaacattgctgaggg

SEQ ID NO: 7479 - RNA, 20 nt, synthetic construct
  misc_feature 1..20: note = source = /note="Description of Artificial Sequence: Synthetic oligonucleotide"
  source 1..20: mol_type = other RNA
gctacctacaacattgctga

SEQ ID NO: 7480 - RNA, 20 nt, synthetic construct
  misc_feature 1..20: note = source = /note="Description of Artificial Sequence: Synthetic oligonucleotide"
  source 1..20: mol_type = other RNA
agctacctacaacattgctg

SEQ ID NO: 7481 - RNA, 20 nt, synthetic construct
  misc_feature 1..20: note = source = /note="Description of Artificial Sequence: Synthetic oligonucleotide"
  source 1..20: mol_type = other RNA
aacactaagtcaaaggtaaa

SEQ ID NO: 7482 - RNA, 20 nt, synthetic construct
  misc_feature 1..20: note = source = /note="Description of Artificial Sequence: Synthetic oligonucleotide"
  source 1..20: mol_type = other RNA
agagaaaaacactaagtcaa

SEQ ID NO: 7483 - RNA, 20 nt, synthetic construct
  misc_feature 1..20: note = source = /note="Description of Artificial Sequence: Synthetic oligonucleotide"
  source 1..20: mol_type = other RNA
gctcttgtccctgtcaatgt

SEQ ID NO: 7484 - RNA, 20 nt, synthetic construct
  misc_feature 1..20: note = source = /note="Description of Artificial Sequence: Synthetic oligonucleotide"
  source 1..20: mol_type = other RNA
agctcttgtccctgtcaatg

SEQ ID NO: 7485 - RNA, 20 nt, synthetic construct
  misc_feature 1..20: note = source = /note="Description of Artificial Sequence: Synthetic oligonucleotide"
  source 1..20: mol_type = other RNA
gccatgggaatacaggagag

SEQ ID NO: 7486 - RNA, 20 nt, synthetic construct
  misc_feature 1..20: note = source = /note="Description of Artificial Sequence: Synthetic oligonucleotide"
  source 1..20: mol_type = other RNA
tgccatgggaatacaggaga

SEQ ID NO: 7487 - RNA, 20 nt, synthetic construct
  misc_feature 1..20: note = source = /note="Description of Artificial Sequence: Synthetic oligonucleotide"
  source 1..20: mol_type = other RNA
gtgccatgggaatacaggag

SEQ ID NO: 7488 - RNA, 20 nt, synthetic construct
  misc_feature 1..20: note = source = /note="Description of Artificial Sequence: Synthetic oligonucleotide"
  source 1..20: mol_type = other RNA
ctgaagtgccatgggaatac

SEQ ID NO: 7489 - RNA, 20 nt, synthetic construct
  misc_feature 1..20: note = source = /note="Description of Artificial Sequence: Synthetic oligonucleotide"
  source 1..20: mol_type = other RNA
tgagactactgaagtgccat

SEQ ID NO: 7490 - RNA, 20 nt, synthetic construct
  misc_feature 1..20: note = source = /note="Description of Artificial Sequence: Synthetic oligonucleotide"
  source 1..20: mol_type = other RNA
atgagactactgaagtgcca

SEQ ID NO: 7491 - RNA, 20 nt, synthetic construct
  misc_feature 1..20: note = source = /note="Description of Artificial Sequence: Synthetic oligonucleotide"
  source 1..20: mol_type = other RNA
cctgaactgtggttatgttg

SEQ ID NO: 7492 - RNA, 20 nt, synthetic construct
  misc_feature 1..20: note = source = /note="Description of Artificial Sequence: Synthetic oligonucleotide"
  source 1..20: mol_type = other RNA
tcctctactgccctgaactg

SEQ ID NO: 7493 - RNA, 20 nt, synthetic construct
  misc_feature 1..20: note = source = /note="Description of Artificial Sequence: Synthetic oligonucleotide"
  source 1..20: mol_type = other RNA
tcagtgcagttgccatggca

SEQ ID NO: 7494 - RNA, 20 nt, synthetic construct
  misc_feature 1..20: note = source = /note="Description of Artificial Sequence: Synthetic oligonucleotide"
  source 1..20: mol_type = other RNA
ctcactcagtgcagttgcca

SEQ ID NO: 7495 - RNA, 20 nt, synthetic construct
  misc_feature 1..20: note = source = /note="Description of Artificial Sequence: Synthetic oligonucleotide"
  source 1..20: mol_type = other RNA
gataatgtcactcagagaat

SEQ ID NO: 7496 - RNA, 20 nt, synthetic construct
  misc_feature 1..20: note = source = /note="Description of Artificial Sequence: Synthetic oligonucleotide"
  source 1..20: mol_type = other RNA
atttttctctagaatatttg

SEQ ID NO: 7497 - RNA, 20 nt, synthetic construct
  misc_feature 1..20: note = source = /note="Description of Artificial Sequence: Synthetic oligonucleotide"
  source 1..20: mol_type = other RNA
ccagattatctttgcaatgc

SEQ ID NO: 7498 - RNA, 20 nt, synthetic construct
  misc_feature 1..20: note = source = /note="Description of Artificial Sequence: Synthetic oligonucleotide"
  source 1..20: mol_type = other RNA
aaacgtaaacttttaggaca

SEQ ID NO: 7499 - RNA, 20 nt, synthetic construct
  misc_feature 1..20: note = source = /note="Description of Artificial Sequence: Synthetic oligonucleotide"
  source 1..20: mol_type = other RNA
aaaagaaaacgtaaactttt

SEQ ID NO: 7500 - RNA, 20 nt, synthetic construct
  misc_feature 1..20: note = source = /note="Description of Artificial Sequence: Synthetic oligonucleotide"
  source 1..20: mol_type = other RNA
atcatttctttatgtggttt

SEQ ID NO: 7501 - RNA, 20 nt, synthetic construct
  misc_feature 1..20: note = source = /note="Description of Artificial Sequence: Synthetic oligonucleotide"
  source 1..20: mol_type = other RNA
aatcatttctttatgtggtt

SEQ ID NO: 7502 - RNA, 20 nt, synthetic construct
  misc_feature 1..20: note = source = /note="Description of Artificial Sequence: Synthetic oligonucleotide"
  source 1..20: mol_type = other RNA
caacaaatcatttctttatg

SEQ ID NO: 7503 - RNA, 20 nt, synthetic construct
  misc_feature 1..20: note = source = /note="Description of Artificial Sequence: Synthetic oligonucleotide"
  source 1..20: mol_type = other RNA
gtaattattaagatgattaa

SEQ ID NO: 7504 - RNA, 20 nt, synthetic construct
  misc_feature 1..20: note = source = /note="Description of Artificial Sequence: Synthetic oligonucleotide"
  source 1..20: mol_type = other RNA
tgtaattattaagatgatta

SEQ ID NO: 7505 - RNA, 20 nt, synthetic construct
  misc_feature 1..20: note = source = /note="Description of Artificial Sequence: Synthetic oligonucleotide"
  source 1..20: mol_type = other RNA
tattttggctacgtatctgt

SEQ ID NO: 7506 - RNA, 20 nt, synthetic construct
  misc_feature 1..20: note = source = /note="Description of Artificial Sequence: Synthetic oligonucleotide"
  source 1..20: mol_type = other RNA
ggattaaaaaacaagtattt

SEQ ID NO: 7507 - RNA, 20 nt, synthetic construct
  misc_feature 1..20: note = source = /note="Description of Artificial Sequence: Synthetic oligonucleotide"
  source 1..20: mol_type = other RNA
aagctttttttttaaggttt

SEQ ID NO: 7508 - RNA, 20 nt, synthetic construct
  misc_feature 1..20: note = source = /note="Description of Artificial Sequence: Synthetic oligonucleotide"
  source 1..20: mol_type = other RNA
caatttaagcttttttttta

SEQ ID NO: 7509 - RNA, 20 nt, synthetic construct
  misc_feature 1..20: note = source = /note="Description of Artificial Sequence: Synthetic oligonucleotide"
  source 1..20: mol_type = other RNA
aaagacaagtgcataattaa

SEQ ID NO: 7510 - RNA, 20 nt, synthetic construct
  misc_feature 1..20: note = source = /note="Description of Artificial Sequence: Synthetic oligonucleotide"
  source 1..20: mol_type = other RNA
ccctgatccggattcgtgag

SEQ ID NO: 7511 - RNA, 20 nt, synthetic construct
  misc_feature 1..20: note = source = /note="Description of Artificial Sequence: Synthetic oligonucleotide"
  source 1..20: mol_type = other RNA
gtctccgagggtgtccctga

SEQ ID NO: 7512 - RNA, 20 nt, synthetic construct
  misc_feature 1..20: note = source = /note="Description of Artificial Sequence: Synthetic oligonucleotide"
  source 1..20: mol_type = other RNA
ggttttgtctccgagggtgt

SEQ ID NO: 7513 - RNA, 20 nt, synthetic construct
  misc_feature 1..20: note = source = /note="Description of Artificial Sequence: Synthetic oligonucleotide"
  source 1..20: mol_type = other RNA
tggttttgtctccgagggtg

SEQ ID NO: 7514 - RNA, 20 nt, synthetic construct
  misc_feature 1..20: note = source = /note="Description of Artificial Sequence: Synthetic oligonucleotide"
  source 1..20: mol_type = other RNA
taccacttcgtggttttgtc

SEQ ID NO: 7515 - RNA, 20 nt, synthetic construct
  misc_feature 1..20: note = source = /note="Description of Artificial Sequence: Synthetic oligonucleotide"
  source 1..20: mol_type = other RNA
ttttgactccttagacgggt

SEQ ID NO: 7516 - RNA, 20 nt, synthetic construct
  misc_feature 1..20: note = source = /note="Description of Artificial Sequence: Synthetic oligonucleotide"
  source 1..20: mol_type = other RNA
aaaatttctacacttttgac

SEQ ID NO: 7517 - RNA, 20 nt, synthetic construct
  misc_feature 1..20: note = source = /note="Description of Artificial Sequence: Synthetic oligonucleotide"
  source 1..20: mol_type = other RNA
aacatttcagagtagcagct

SEQ ID NO: 7518 - RNA, 20 nt, synthetic construct
  misc_feature 1..20: note = source = /note="Description of Artificial Sequence: Synthetic oligonucleotide"
  source 1..20: mol_type = other RNA
taagtaataatatgtaacaa

SEQ ID NO: 7519 - RNA, 20 nt, synthetic construct
  misc_feature 1..20: note = source = /note="Description of Artificial Sequence: Synthetic oligonucleotide"
  source 1..20: mol_type = other RNA
gtcacggctaagaaattcta

SEQ ID NO: 7520 - RNA, 20 nt, synthetic construct
  misc_feature 1..20: note = source = /note="Description of Artificial Sequence: Synthetic oligonucleotide"
  source 1..20: mol_type = other RNA
ttgttggtttggtatagtca

SEQ ID NO: 7521 - RNA, 20 nt, synthetic construct
  misc_feature 1..20: note = source = /note="Description of Artificial Sequence: Synthetic oligonucleotide"
  source 1..20: mol_type = other RNA
ataaagttgtcctctaaatc

SEQ ID NO: 7522 - RNA, 20 nt, synthetic construct
  misc_feature 1..20: note = source = /note="Description of Artificial Sequence: Synthetic oligonucleotide"
  source 1..20: mol_type = other RNA
tgacccctaatataaagttg

SEQ ID NO: 7523 - RNA, 20 nt, synthetic construct
  misc_feature 1..20: note = source = /note="Description of Artificial Sequence: Synthetic oligonucleotide"
  source 1..20: mol_type = other RNA
ccgggggtggaggttgtgac

SEQ ID NO: 7524 - RNA, 20 nt, synthetic construct
  misc_feature 1..20: note = source = /note="Description of Artificial Sequence: Synthetic oligonucleotide"
  source 1..20: mol_type = other RNA
tccgggggtggaggttgtga

SEQ ID NO: 7525 - RNA, 20 nt, synthetic construct
  misc_feature 1..20: note = source = /note="Description of Artificial Sequence: Synthetic oligonucleotide"
  source 1..20: mol_type = other RNA
gtccgggggtggaggttgtg

SEQ ID NO: 7526 - RNA, 20 nt, synthetic construct
  misc_feature 1..20: note = source = /note="Description of Artificial Sequence: Synthetic oligonucleotide"
  source 1..20: mol_type = other RNA
attaggtttgtgaagggtgg

SEQ ID NO: 7527 - RNA, 20 nt, synthetic construct
  misc_feature 1..20: note = source = /note="Description of Artificial Sequence: Synthetic oligonucleotide"
  source 1..20: mol_type = other RNA
tcctgtcgtggtacggtact

SEQ ID NO: 7528 - RNA, 20 nt, synthetic construct
  misc_feature 1..20: note = source = /note="Description of Artificial Sequence: Synthetic oligonucleotide"
  source 1..20: mol_type = other RNA
ctcctgtcgtggtacggtac

SEQ ID NO: 7529 - RNA, 20 nt, synthetic construct
  misc_feature 1..20: note = source = /note="Description of Artificial Sequence: Synthetic oligonucleotide"
  source 1..20: mol_type = other RNA
gaactcttgagtgatagtcc

SEQ ID NO: 7530 - RNA, 20 nt, synthetic construct
  misc_feature 1..20: note = source = /note="Description of Artificial Sequence: Synthetic oligonucleotide"
  source 1..20: mol_type = other RNA
agagaactcttgagtgatag

SEQ ID NO: 7531 - RNA, 20 nt, synthetic construct
  misc_feature 1..20: note = source = /note="Description of Artificial Sequence: Synthetic oligonucleotide"
  source 1..20: mol_type = other RNA
ctcccttcctctgtccctcc

SEQ ID NO: 7532 - RNA, 20 nt, synthetic construct
  misc_feature 1..20: note = source = /note="Description of Artificial Sequence: Synthetic oligonucleotide"
  source 1..20: mol_type = other RNA
cctcccttcctctgtccctc

SEQ ID NO: 7533 - RNA, 20 nt, synthetic construct
  misc_feature 1..20: note = source = /note="Description of Artificial Sequence: Synthetic oligonucleotide"
  source 1..20: mol_type = other RNA
ccctcccttcctctgtccct

SEQ ID NO: 7534 - RNA, 20 nt, synthetic construct
  misc_feature 1..20: note = source = /note="Description of Artificial Sequence: Synthetic oligonucleotide"
  source 1..20: mol_type = other RNA
tccctcccttcctctgtccc

SEQ ID NO: 7535 - RNA, 20 nt, synthetic construct
  misc_feature 1..20: note = source = /note="Description of Artificial Sequence: Synthetic oligonucleotide"
  source 1..20: mol_type = other RNA
ctctccctcccttcctctgt

SEQ ID NO: 7536 - RNA, 20 nt, synthetic construct
  misc_feature 1..20: note = source = /note="Description of Artificial Sequence: Synthetic oligonucleotide"
  source 1..20: mol_type = other RNA
tctctccctcccttcctctg

SEQ ID NO: 7537 - RNA, 20 nt, synthetic construct
  misc_feature 1..20: note = source = /note="Description of Artificial Sequence: Synthetic oligonucleotide"
  source 1..20: mol_type = other RNA
cccttcctctctccctccct

SEQ ID NO: 7538 - RNA, 20 nt, synthetic construct
  misc_feature 1..20: note = source = /note="Description of Artificial Sequence: Synthetic oligonucleotide"
  source 1..20: mol_type = other RNA
ccctcccttcctctctccct

SEQ ID NO: 7539 - RNA, 20 nt, synthetic construct
  misc_feature 1..20: note = source = /note="Description of Artificial Sequence: Synthetic oligonucleotide"
  source 1..20: mol_type = other RNA
tccctcccttcctctctccc

SEQ ID NO: 7540 - RNA, 20 nt, synthetic construct
  misc_feature 1..20: note = source = /note="Description of Artificial Sequence: Synthetic oligonucleotide"
  source 1..20: mol_type = other RNA
gtctccctcccttcctctct

SEQ ID NO: 7541 - RNA, 20 nt, synthetic construct
  misc_feature 1..20: note = source = /note="Description of Artificial Sequence: Synthetic oligonucleotide"
  source 1..20: mol_type = other RNA
tgtctccctcccttcctctc

SEQ ID NO: 7542 - RNA, 20 nt, synthetic construct
  misc_feature 1..20: note = source = /note="Description of Artificial Sequence: Synthetic oligonucleotide"
  source 1..20: mol_type = other RNA
cccttcctgtctccctccct

SEQ ID NO: 7543 - RNA, 20 nt, synthetic construct
  misc_feature 1..20: note = source = /note="Description of Artificial Sequence: Synthetic oligonucleotide"
  source 1..20: mol_type = other RNA
ccctcccttcctgtctccct

SEQ ID NO: 7544 - RNA, 20 nt, synthetic construct
  misc_feature 1..20: note = source = /note="Description of Artificial Sequence: Synthetic oligonucleotide"
  source 1..20: mol_type = other RNA
tccctcccttcctgtctccc

SEQ ID NO: 7545 - RNA, 20 nt, synthetic construct
  misc_feature 1..20: note = source = /note="Description of Artificial Sequence: Synthetic oligonucleotide"
  source 1..20: mol_type = other RNA
ttctccctcccttcctgtct

SEQ ID NO: 7546 - RNA, 20 nt, synthetic construct
  misc_feature 1..20: note = source = /note="Description of Artificial Sequence: Synthetic oligonucleotide"
  source 1..20: mol_type = other RNA
cttctccctcccttcctgtc

SEQ ID NO: 7547 - RNA, 20 nt, synthetic construct
  misc_feature 1..20: note = source = /note="Description of Artificial Sequence: Synthetic oligonucleotide"
  source 1..20: mol_type = other RNA
ctccctccttctccctccct

SEQ ID NO: 7548 - RNA, 20 nt, synthetic construct
  misc_feature 1..20: note = source = /note="Description of Artificial Sequence: Synthetic oligonucleotide"
  source 1..20: mol_type = other RNA
ccttctccctccttctccct

SEQ ID NO: 7549 - RNA, 20 nt, synthetic construct
  misc_feature 1..20: note = source = /note="Description of Artificial Sequence: Synthetic oligonucleotide"
  source 1..20: mol_type = other RNA
tccttctccctccttctccc

SEQ ID NO: 7550 - RNA, 20 nt, synthetic construct
  misc_feature 1..20: note = source = /note="Description of Artificial Sequence: Synthetic oligonucleotide"
  source 1..20: mol_type = other RNA
ctctccttctccctccttct

SEQ ID NO: 7551 - RNA, 20 nt, synthetic construct
  misc_feature 1..20: note = source = /note="Description of Artificial Sequence: Synthetic oligonucleotide"
  source 1..20: mol_type = other RNA
tctctccttctccctccttc

SEQ ID NO: 7552 - RNA, 20 nt, synthetic construct
  misc_feature 1..20: note = source = /note="Description of Artificial Sequence: Synthetic oligonucleotide"
  source 1..20: mol_type = other RNA
tttttctctctccttctccc

SEQ ID NO: 7553 - RNA, 20 nt, synthetic construct
  misc_feature 1..20: note = source = /note="Description of Artificial Sequence: Synthetic oligonucleotide"
  source 1..20: mol_type = other RNA
ctctttttctctctccttct

SEQ ID NO: 7554 - RNA, 20 nt, synthetic construct
  misc_feature 1..20: note = source = /note="Description of Artificial Sequence: Synthetic oligonucleotide"
  source 1..20: mol_type = other RNA
cctctttttctctctccttc

SEQ ID NO: 7555 - RNA, 20 nt, synthetic construct
  misc_feature 1..20: note = source = /note="Description of Artificial Sequence: Synthetic oligonucleotide"
  source 1..20: mol_type = other RNA
cctcaccctctttttctctc

SEQ ID NO: 7556 - RNA, 20 nt, synthetic construct
  misc_feature 1..20: note = source = /note="Description of Artificial Sequence: Synthetic oligonucleotide"
  source 1..20: mol_type = other RNA
cgtagattgtaccgacctca

SEQ ID NO: 7557 - RNA, 20 nt, synthetic construct
  misc_feature 1..20: note = source = /note="Description of Artificial Sequence: Synthetic oligonucleotide"
  source 1..20: mol_type = other RNA
ccgtagattgtaccgacctc

SEQ ID NO: 7558 - RNA, 20 nt, synthetic construct
  misc_feature 1..20: note = source = /note="Description of Artificial Sequence: Synthetic oligonucleotide"
  source 1..20: mol_type = other RNA
ctcgtccgtagattgtaccg

SEQ ID NO: 7559 - RNA, 20 nt, synthetic construct
  misc_feature 1..20: note = source = /note="Description of Artificial Sequence: Synthetic oligonucleotide"
  source 1..20: mol_type = other RNA
tcccctcgtccgtagattgt

SEQ ID NO: 7560 - RNA, 20 nt, synthetic construct
  misc_feature 1..20: note = source = /note="Description of Artificial Sequence: Synthetic oligonucleotide"
  source 1..20: mol_type = other RNA
cgtctttcgttttcccctcg

SEQ ID NO: 7561 - RNA, 20 nt, synthetic construct
  misc_feature 1..20: note = source = /note="Description of Artificial Sequence: Synthetic oligonucleotide"
  source 1..20: mol_type = other RNA
tagtaccgtctttcgttttc

SEQ ID NO: 7562 - RNA, 20 nt, synthetic construct
  misc_feature 1..20: note = source = /note="Description of Artificial Sequence: Synthetic oligonucleotide"
  source 1..20: mol_type = other RNA
ttagtaccgtctttcgtttt

SEQ ID NO: 7563 - RNA, 20 nt, synthetic construct
  misc_feature 1..20: note = source = /note="Description of Artificial Sequence: Synthetic oligonucleotide"
  source 1..20: mol_type = other RNA
attagtaccgtctttcgttt

SEQ ID NO: 7564 - RNA, 20 nt, synthetic construct
  misc_feature 1..20: note = source = /note="Description of Artificial Sequence: Synthetic oligonucleotide"
  source 1..20: mol_type = other RNA
ggaatgttttgaatattagt

SEQ ID NO: 7565 - RNA, 20 nt, synthetic construct
  misc_feature 1..20: note = source = /note="Description of Artificial Sequence: Synthetic oligonucleotide"
  source 1..20: mol_type = other RNA
tgaccgtagacgaaacccac

SEQ ID NO: 7566 - RNA, 20 nt, synthetic construct
  misc_feature 1..20: note = source = /note="Description of Artificial Sequence: Synthetic oligonucleotide"
  source 1..20: mol_type = other RNA
tttcgtgaccgtagacgaaa

SEQ ID NO: 7567 - RNA, 20 nt, synthetic construct
  misc_feature 1..20: note = source = /note="Description of Artificial Sequence: Synthetic oligonucleotide"
  source 1..20: mol_type = other RNA
gtttcgtgaccgtagacgaa

SEQ ID NO: 7568 - RNA, 20 nt, synthetic construct
  misc_feature 1..20: note = source = /note="Description of Artificial Sequence: Synthetic oligonucleotide"
  source 1..20: mol_type = other RNA
gacatatcctccgtttcgtg

SEQ ID NO: 7569 - RNA, 20 nt, synthetic construct
  misc_feature 1..20: note = source = /note="Description of Artificial Sequence: Synthetic oligonucleotide"
  source 1..20: mol_type = other RNA
ccaagacgtccgacatatcc

SEQ ID NO: 7570 - RNA, 20 nt, synthetic construct
  misc_feature 1..20: note = source = /note="Description of Artificial Sequence: Synthetic oligonucleotide"
  source 1..20: mol_type = other RNA
gtaccaagacgtccgacata

SEQ ID NO: 7571 - RNA, 20 nt, synthetic construct
  misc_feature 1..20: note = source = /note="Description of Artificial Sequence: Synthetic oligonucleotide"
  source 1..20: mol_type = other RNA
attaaccgagtaccaagacg

SEQ ID NO: 7572 - RNA, 20 nt, synthetic construct
  misc_feature 1..20: note = source = /note="Description of Artificial Sequence: Synthetic oligonucleotide"
  source 1..20: mol_type = other RNA
tttatccaaattaaccgagt

SEQ ID NO: 7573 - RNA, 20 nt, synthetic construct
  misc_feature 1..20: note = source = /note="Description of Artificial Sequence: Synthetic oligonucleotide"
  source 1..20: mol_type = other RNA
atattcttttatccaaatta

SEQ ID NO: 7574 - RNA, 20 nt, synthetic construct
  misc_feature 1..20: note = source = /note="Description of Artificial Sequence: Synthetic oligonucleotide"
  source 1..20: mol_type = other RNA
acccattaaatattctttta

SEQ ID NO: 7575 - RNA, 20 nt, synthetic construct
  misc_feature 1..20: note = source = /note="Description of Artificial Sequence: Synthetic oligonucleotide"
  source 1..20: mol_type = other RNA
gatatttctttatcgacaga

SEQ ID NO: 7576 - RNA, 20 nt, synthetic construct
  misc_feature 1..20: note = source = /note="Description of Artificial Sequence: Synthetic oligonucleotide"
  source 1..20: mol_type = other RNA
cgatatttctttatcgacag

SEQ ID NO: 7577 - RNA, 20 nt, synthetic construct
  misc_feature 1..20: note = source = /note="Description of Artificial Sequence: Synthetic oligonucleotide"
  source 1..20: mol_type = other RNA
aaccttttgaaaggatacaa

SEQ ID NO: 7578 - RNA, 20 nt, synthetic construct
  misc_feature 1..20: note = source = /note="Description of Artificial Sequence: Synthetic oligonucleotide"
  source 1..20: mol_type = other RNA
tagcattttaaccttttgaa

SEQ ID NO: 7579 - RNA, 20 nt, synthetic construct
  misc_feature 1..20: note = source = /note="Description of Artificial Sequence: Synthetic oligonucleotide"
  source 1..20: mol_type = other RNA
ggacaaagagatcttgcttc

SEQ ID NO: 7580 - RNA, 20 nt, synthetic construct
  misc_feature 1..20: note = source = /note="Description of Artificial Sequence: Synthetic oligonucleotide"
  source 1..20: mol_type = other RNA
catctttatttccagaattc

SEQ ID NO: 7581 - RNA, 20 nt, synthetic construct
  misc_feature 1..20: note = source = /note="Description of Artificial Sequence: Synthetic oligonucleotide"
  source 1..20: mol_type = other RNA
aaatacatgccatattattt

SEQ ID NO: 7582 - RNA, 20 nt, synthetic construct
  misc_feature 1..20: note = source = /note="Description of Artificial Sequence: Synthetic oligonucleotide"
  source 1..20: mol_type = other RNA
gtgttacacgagaactcttg

SEQ ID NO: 7583 - RNA, 20 nt, synthetic construct
  misc_feature 1..20: note = source = /note="Description of Artificial Sequence: Synthetic oligonucleotide"
  source 1..20: mol_type = other RNA
atgctcttatgggttatagc

SEQ ID NO: 7584 - RNA, 20 nt, synthetic construct
  misc_feature 1..20: note = source = /note="Description of Artificial Sequence: Synthetic oligonucleotide"
  source 1..20: mol_type = other RNA
tcctcaggagatgctcttat

SEQ ID NO: 7585 - RNA, 20 nt, synthetic construct
  misc_feature 1..20: note = source = /note="Description of Artificial Sequence: Synthetic oligonucleotide"
  source 1..20: mol_type = other RNA
ttcctcaggagatgctctta

SEQ ID NO: 7586 - RNA, 20 nt, synthetic construct
  misc_feature 1..20: note = source = /note="Description of Artificial Sequence: Synthetic oligonucleotide"
  source 1..20: mol_type = other RNA
cagtttttaacatattcctc

SEQ ID NO: 7587 - RNA, 20 nt, synthetic construct
  misc_feature 1..20: note = source = /note="Description of Artificial Sequence: Synthetic oligonucleotide"
  source 1..20: mol_type = other RNA
agtgactaattgtttaccca

SEQ ID NO: 7588 - RNA, 20 nt, synthetic construct
  misc_feature 1..20: note = source = /note="Description of Artificial Sequence: Synthetic oligonucleotide"
  source 1..20: mol_type = other RNA
gagtgactaattgtttaccc

SEQ ID NO: 7589 - RNA, 20 nt, synthetic construct
  misc_feature 1..20: note = source = /note="Description of Artificial Sequence: Synthetic oligonucleotide"
  source 1..20: mol_type = other RNA
gaagaacctttgggaaaacc

SEQ ID NO: 7590 - RNA, 20 nt, synthetic construct
  misc_feature 1..20: note = source = /note="Description of Artificial Sequence: Synthetic oligonucleotide"
  source 1..20: mol_type = other RNA
acagagacagaagaaccttt

SEQ ID NO: 7591 - RNA, 20 nt, synthetic construct
  misc_feature 1..20: note = source = /note="Description of Artificial Sequence: Synthetic oligonucleotide"
  source 1..20: mol_type = other RNA
aacagagacagaagaacctt

SEQ ID NO: 7592 - RNA, 20 nt, synthetic construct
  misc_feature 1..20: note = source = /note="Description of Artificial Sequence: Synthetic oligonucleotide"
  source 1..20: mol_type = other RNA
cttttttggggttgttaaac

SEQ ID NO: 7593 - RNA, 20 nt, synthetic construct
  misc_feature 1..20: note = source = /note="Description of Artificial Sequence: Synthetic oligonucleotide"
  source 1..20: mol_type = other RNA
caaaattaaggccttttttg

SEQ ID NO: 7594 - RNA, 20 nt, synthetic construct
  misc_feature 1..20: note = source = /note="Description of Artificial Sequence: Synthetic oligonucleotide"
  source 1..20: mol_type = other RNA
tcaaaattaaggcctttttt

SEQ ID NO: 7595 - RNA, 20 nt, synthetic construct
  misc_feature 1..20: note = source = /note="Description of Artificial Sequence: Synthetic oligonucleotide"
  source 1..20: mol_type = other RNA
atcaaaattaaggccttttt

SEQ ID NO: 7596 - RNA, 20 nt, synthetic construct
  misc_feature 1..20: note = source = /note="Description of Artificial Sequence: Synthetic oligonucleotide"
  source 1..20: mol_type = other RNA
atgctggccaatcaaaatta

SEQ ID NO: 7597 - RNA, 20 nt, synthetic construct
  misc_feature 1..20: note = source = /note="Description of Artificial Sequence: Synthetic oligonucleotide"
  source 1..20: mol_type = other RNA
tgtctttcctaagaggatgc

SEQ ID NO: 7598 - RNA, 20 nt, synthetic construct
  misc_feature 1..20: note = source = /note="Description of Artificial Sequence: Synthetic oligonucleotide"
  source 1..20: mol_type = other RNA
atggcaatgtctttcctaag

SEQ ID NO: 7599 - RNA, 20 nt, synthetic construct
  misc_feature 1..20: note = source = /note="Description of Artificial Sequence: Synthetic oligonucleotide"
  source 1..20: mol_type = other RNA
gaagcaactttacaagagga

SEQ ID NO: 7600 - RNA, 20 nt, synthetic construct
  misc_feature 1..20: note = source = /note="Description of Artificial Sequence: Synthetic oligonucleotide"
  source 1..20: mol_type = other RNA
atgagaagcaactttacaag

SEQ ID NO: 7601 - RNA, 20 nt, synthetic construct
  misc_feature 1..20: note = source = /note="Description of Artificial Sequence: Synthetic oligonucleotide"
  source 1..20: mol_type = other RNA
tataaaaatcattccctaga

SEQ ID NO: 7602 - RNA, 20 nt, synthetic construct
  misc_feature 1..20: note = source = /note="Description of Artificial Sequence: Synthetic oligonucleotide"
  source 1..20: mol_type = other RNA
ttcaaacaccttgctattga

SEQ ID NO: 7603 - RNA, 20 nt, synthetic construct
  misc_feature 1..20: note = source = /note="Description of Artificial Sequence: Synthetic oligonucleotide"
  source 1..20: mol_type = other RNA
cagagaacacaaaattaata

SEQ ID NO: 7604 - RNA, 20 nt, synthetic construct
  misc_feature 1..20: note = source = /note="Description of Artificial Sequence: Synthetic oligonucleotide"
  source 1..20: mol_type = other RNA
ataaatataaatttttgcta

SEQ ID NO: 7605 - RNA, 20 nt, synthetic construct
  misc_feature 1..20: note = source = /note="Description of Artificial Sequence: Synthetic oligonucleotide"
  source 1..20: mol_type = other RNA
ttcatgctgtagtttttatg

SEQ ID NO: 7606 - RNA, 20 nt, synthetic construct
  misc_feature 1..20: note = source = /note="Description of Artificial Sequence: Synthetic oligonucleotide"
  source 1..20: mol_type = other RNA
tttcatgctgtagtttttat

SEQ ID NO: 7607 - RNA, 20 nt, synthetic construct
  misc_feature 1..20: note = source = /note="Description of Artificial Sequence: Synthetic oligonucleotide"
  source 1..20: mol_type = other RNA
ctttcatgctgtagttttta

SEQ ID NO: 7608 - RNA, 20 nt, synthetic construct
  misc_feature 1..20: note = source = /note="Description of Artificial Sequence: Synthetic oligonucleotide"
  source 1..20: mol_type = other RNA
attttgcttaataaaagaga

SEQ ID NO: 7609 - RNA, 20 nt, synthetic construct
  misc_feature 1..20: note = source = /note="Description of Artificial Sequence: Synthetic oligonucleotide"
  source 1..20: mol_type = other RNA
cactttttatatacataccc

SEQ ID NO: 7610 - RNA, 20 nt, synthetic construct
  misc_feature 1..20: note = source = /note="Description of Artificial Sequence: Synthetic oligonucleotide"
  source 1..20: mol_type = other RNA
taataaactgccattttaga

SEQ ID NO: 7611 - RNA, 20 nt, synthetic construct
  misc_feature 1..20: note = source = /note="Description of Artificial Sequence: Synthetic oligonucleotide"
  source 1..20: mol_type = other RNA
tggtctttaaatcttatttc

SEQ ID NO: 7612 - RNA, 20 nt, synthetic construct
  misc_feature 1..20: note = source = /note="Description of Artificial Sequence: Synthetic oligonucleotide"
  source 1..20: mol_type = other RNA
gaatgaggaaaatttgttat

SEQ ID NO: 7613 - RNA, 20 nt, synthetic construct
  misc_feature 1..20: note = source = /note="Description of Artificial Sequence: Synthetic oligonucleotide"
  source 1..20: mol_type = other RNA
gaaagttatatgttagaatg

SEQ ID NO: 7614 - RNA, 20 nt, synthetic construct
  misc_feature 1..20: note = source = /note="Description of Artificial Sequence: Synthetic oligonucleotide"
  source 1..20: mol_type = other RNA
aactttttcacaagaagggc

SEQ ID NO: 7615 - RNA, 20 nt, synthetic construct
  misc_feature 1..20: note = source = /note="Description of Artificial Sequence: Synthetic oligonucleotide"
  source 1..20: mol_type = other RNA
ggttaactttttcacaagaa

SEQ ID NO: 7616 - RNA, 20 nt, synthetic construct
  misc_feature 1..20: note = source = /note="Description of Artificial Sequence: Synthetic oligonucleotide"
  source 1..20: mol_type = other RNA
tggttaactttttcacaaga

SEQ ID NO: 7617 - RNA, 20 nt, synthetic construct
  misc_feature 1..20: note = source = /note="Description of Artificial Sequence: Synthetic oligonucleotide"
  source 1..20: mol_type = other RNA
catttgtgtgaaaagtttaa

SEQ ID NO: 7618 - RNA, 20 nt, synthetic construct
  misc_feature 1..20: note = source = /note="Description of Artificial Sequence: Synthetic oligonucleotide"
  source 1..20: mol_type = other RNA
atatggagttttaaacacaa

SEQ ID NO: 7619 - RNA, 20 nt, synthetic construct
  misc_feature 1..20: note = source = /note="Description of Artificial Sequence: Synthetic oligonucleotide"
  source 1..20: mol_type = other RNA
aaaagaaatgtatttcaata

SEQ ID NO: 7620 - RNA, 20 nt, synthetic construct
  misc_feature 1..20: note = source = /note="Description of Artificial Sequence: Synthetic oligonucleotide"
  source 1..20: mol_type = other RNA
taatagctactaagaaatga

SEQ ID NO: 7621 - RNA, 20 nt, synthetic construct
  misc_feature 1..20: note = source = /note="Description of Artificial Sequence: Synthetic oligonucleotide"
  source 1..20: mol_type = other RNA
gacattctttaaagtgtcaa

SEQ ID NO: 7622 - RNA, 20 nt, synthetic construct
  misc_feature 1..20: note = source = /note="Description of Artificial Sequence: Synthetic oligonucleotide"
  source 1..20: mol_type = other RNA
ggacattctttaaagtgtca

SEQ ID NO: 7623 - RNA, 20 nt, synthetic construct
  misc_feature 1..20: note = source = /note="Description of Artificial Sequence: Synthetic oligonucleotide"
  source 1..20: mol_type = other RNA
taatccattccacataattt

SEQ ID NO: 7624 - RNA, 20 nt, synthetic construct
  misc_feature 1..20: note = source = /note="Description of Artificial Sequence: Synthetic oligonucleotide"
  source 1..20: mol_type = other RNA
acatgtttttctactttcta

SEQ ID NO: 7625 - RNA, 20 nt, synthetic construct
  misc_feature 1..20: note = source = /note="Description of Artificial Sequence: Synthetic oligonucleotide"
  source 1..20: mol_type = other RNA
ataaattatataaaatttgt

SEQ ID NO: 7626 - RNA, 20 nt, synthetic construct
  misc_feature 1..20: note = source = /note="Description of Artificial Sequence: Synthetic oligonucleotide"
  source 1..20: mol_type = other RNA
tcatatacagagcaatcaaa

SEQ ID NO: 7627 - RNA, 20 nt, synthetic construct
  misc_feature 1..20: note = source = /note="Description of Artificial Sequence: Synthetic oligonucleotide"
  source 1..20: mol_type = other RNA
aaaaaaaggcacttttcttt

SEQ ID NO: 7628 - RNA, 20 nt, synthetic construct
  misc_feature 1..20: note = source = /note="Description of Artificial Sequence: Synthetic oligonucleotide"
  source 1..20: mol_type = other RNA
gtccagatactaccaaaaaa

SEQ ID NO: 7629 - RNA, 20 nt, synthetic construct
  misc_feature 1..20: note = source = /note="Description of Artificial Sequence: Synthetic oligonucleotide"
  source 1..20: mol_type = other RNA
ctatcacttttcaaaaatta

SEQ ID NO: 7630 - RNA, 20 nt, synthetic construct
  misc_feature 1..20: note = source = /note="Description of Artificial Sequence: Synthetic oligonucleotide"
  source 1..20: mol_type = other RNA
tgagaggcttctccaaaatc

SEQ ID NO: 7631 - RNA, 20 nt, synthetic construct
  misc_feature 1..20: note = source = /note="Description of Artificial Sequence: Synthetic oligonucleotide"
  source 1..20: mol_type = other RNA
tttgtagtctttgatatgag

SEQ ID NO: 7632 - RNA, 20 nt, synthetic construct
  misc_feature 1..20: note = source = /note="Description of Artificial Sequence: Synthetic oligonucleotide"
  source 1..20: mol_type = other RNA
acacctaataaagaaacttt

SEQ ID NO: 7633 - RNA, 20 nt, synthetic construct
  misc_feature 1..20: note = source = /note="Description of Artificial Sequence: Synthetic oligonucleotide"
  source 1..20: mol_type = other RNA
agaaaatttgggtgagacaa

SEQ ID NO: 7634 - RNA, 20 nt, synthetic construct
  misc_feature 1..20: note = source = /note="Description of Artificial Sequence: Synthetic oligonucleotide"
  source 1..20: mol_type = other RNA
taacttgtagtagaaaattt

SEQ ID NO: 7635 - RNA, 20 nt, synthetic construct
  misc_feature 1..20: note = source = /note="Description of Artificial Sequence: Synthetic oligonucleotide"
  source 1..20: mol_type = other RNA
ataacttgtagtagaaaatt

SEQ ID NO: 7636 - RNA, 20 nt, synthetic construct
  misc_feature 1..20: note = source = /note="Description of Artificial Sequence: Synthetic oligonucleotide"
  source 1..20: mol_type = other RNA
tcttttacattttaaggtac

SEQ ID NO: 7637 - RNA, 20 nt, synthetic construct
  misc_feature 1..20: note = source = /note="Description of Artificial Sequence: Synthetic oligonucleotide"
  source 1..20: mol_type = other RNA
acttgataaaatttacataa

SEQ ID NO: 7638 - RNA, 20 nt, synthetic construct
  misc_feature 1..20: note = source = /note="Description of Artificial Sequence: Synthetic oligonucleotide"
  source 1..20: mol_type = other RNA
aacttgataaaatttacata

SEQ ID NO: 7639 - RNA, 20 nt, synthetic construct
  misc_feature 1..20: note = source = /note="Description of Artificial Sequence: Synthetic oligonucleotide"
  source 1..20: mol_type = other RNA
tagatacttttgtaaatcaa

SEQ ID NO: 7640 - RNA, 20 nt, synthetic construct
  misc_feature 1..20: note = source = /note="Description of Artificial Sequence: Synthetic oligonucleotide"
  source 1..20: mol_type = other RNA
cagatcaggtttaactctac

SEQ ID NO: 7641 - RNA, 20 nt, synthetic construct
  misc_feature 1..20: note = source = /note="Description of Artificial Sequence: Synthetic oligonucleotide"
  source 1..20: mol_type = other RNA
tccttccatacattaactct

SEQ ID NO: 7642 - RNA, 20 nt, synthetic construct
  misc_feature 1..20: note = source = /note="Description of Artificial Sequence: Synthetic oligonucleotide"
  source 1..20: mol_type = other RNA
ttatttgttataactcatat

SEQ ID NO: 7643 - RNA, 20 nt, synthetic construct
  misc_feature 1..20: note = source = /note="Description of Artificial Sequence: Synthetic oligonucleotide"
  source 1..20: mol_type = other RNA
gcgcggtgacgtgaggtcgg

SEQ ID NO: 7644 - RNA, 20 nt, synthetic construct
  misc_feature 1..20: note = source = /note="Description of Artificial Sequence: Synthetic oligonucleotide"
  source 1..20: mol_type = other RNA
gtaaacttgggtcctccgcc

SEQ ID NO: 7645 - RNA, 20 nt, synthetic construct
  misc_feature 1..20: note = source = /note="Description of Artificial Sequence: Synthetic oligonucleotide"
  source 1..20: mol_type = other RNA
ttagtaaacttgggtcctcc

SEQ ID NO: 7646 - RNA, 20 nt, synthetic construct
  misc_feature 1..20: note = source = /note="Description of Artificial Sequence: Synthetic oligonucleotide"
  source 1..20: mol_type = other RNA
ctcttagtaaacttgggtcc

SEQ ID NO: 7647 - RNA, 20 nt, synthetic construct
  misc_feature 1..20: note = source = /note="Description of Artificial Sequence: Synthetic oligonucleotide"
  source 1..20: mol_type = other RNA
gtcctcttagtaaacttggg

SEQ ID NO: 7648 - RNA, 20 nt, synthetic construct
  misc_feature 1..20: note = source = /note="Description of Artificial Sequence: Synthetic oligonucleotide"
  source 1..20: mol_type = other RNA
caatgaaccctccgactccg

SEQ ID NO: 7649 - RNA, 20 nt, synthetic construct
  misc_feature 1..20: note = source = /note="Description of Artificial Sequence: Synthetic oligonucleotide"
  source 1..20: mol_type = other RNA
gggtcaatgaaccctccgac

SEQ ID NO: 7650 - RNA, 20 nt, synthetic construct
  misc_feature 1..20: note = source = /note="Description of Artificial Sequence: Synthetic oligonucleotide"
  source 1..20: mol_type = other RNA
acatcagggtcaatgaaccc

SEQ ID NO: 7651 - RNA, 20 nt, synthetic construct
  misc_feature 1..20: note = source = /note="Description of Artificial Sequence: Synthetic oligonucleotide"
  source 1..20: mol_type = other RNA
cggacatcagggtcaatgaa

SEQ ID NO: 7652 - RNA, 20 nt, synthetic construct
  misc_feature 1..20: note = source = /note="Description of Artificial Sequence: Synthetic oligonucleotide"
  source 1..20: mol_type = other RNA
acggacatcagggtcaatga

SEQ ID NO: 7653 - RNA, 20 nt, synthetic construct
  misc_feature 1..20: note = source = /note="Description of Artificial Sequence: Synthetic oligonucleotide"
  source 1..20: mol_type = other RNA
gtttttcatcgacccgtacc

SEQ ID NO: 7654 - RNA, 20 nt, synthetic construct
  misc_feature 1..20: note = source = /note="Description of Artificial Sequence: Synthetic oligonucleotide"
  source 1..20: mol_type = other RNA
tatgtttttcatcgacccgt

SEQ ID NO: 7655 - RNA, 20 nt, synthetic construct
  misc_feature 1..20: note = source = /note="Description of Artificial Sequence: Synthetic oligonucleotide"
  source 1..20: mol_type = other RNA
atttttatgtttttcatcga

SEQ ID NO: 7656 - RNA, 20 nt, synthetic construct
  misc_feature 1..20: note = source = /note="Description of Artificial Sequence: Synthetic oligonucleotide"
  source 1..20: mol_type = other RNA
gatttttatgtttttcatcg

SEQ ID NO: 7657 - RNA, 20 nt, synthetic construct
  misc_feature 1..20: note = source = /note="Description of Artificial Sequence: Synthetic oligonucleotide"
  source 1..20: mol_type = other RNA
gctctggtagaaccggttgc

SEQ ID NO: 7658 - RNA, 20 nt, synthetic construct
  misc_feature 1..20: note = source = /note="Description of Artificial Sequence: Synthetic oligonucleotide"
  source 1..20: mol_type = other RNA
agttctctagctctggtaga

SEQ ID NO: 7659 - RNA, 20 nt, synthetic construct
  misc_feature 1..20: note = source = /note="Description of Artificial Sequence: Synthetic oligonucleotide"
  source 1..20: mol_type = other RNA
cgactccgtccgtctagtgc

SEQ ID NO: 7660 - RNA, 20 nt, synthetic construct
  misc_feature 1..20: note = source = /note="Description of Artificial Sequence: Synthetic oligonucleotide"
  source 1..20: mol_type = other RNA
cgtgaaaccctccgactccg

SEQ ID NO: 7661 - RNA, 20 nt, synthetic construct
  misc_feature 1..20: note = source = /note="Description of Artificial Sequence: Synthetic oligonucleotide"
  source 1..20: mol_type = other RNA
gggtcgtgaaaccctccgac

SEQ ID NO: 7662 - RNA, 20 nt, synthetic construct
  misc_feature 1..20: note = source = /note="Description of Artificial Sequence: Synthetic oligonucleotide"
  source 1..20: mol_type = other RNA
acatcagggtcgtgaaaccc

SEQ ID NO: 7663 - RNA, 20 nt, synthetic construct
  misc_feature 1..20: note = source = /note="Description of Artificial Sequence: Synthetic oligonucleotide"
  source 1..20: mol_type = other RNA
cggacatcagggtcgtgaaa

SEQ ID NO: 7664 - RNA, 20 nt, synthetic construct
  misc_feature 1..20: note = source = /note="Description of Artificial Sequence: Synthetic oligonucleotide"
  source 1..20: mol_type = other RNA
gcggacatcagggtcgtgaa

SEQ ID NO: 7665 - RNA, 20 nt, synthetic construct
  misc_feature 1..20: note = source = /note="Description of Artificial Sequence: Synthetic oligonucleotide"
  source 1..20: mol_type = other RNA
tttatttaccggtccgtgcc

SEQ ID NO: 7666 - RNA, 20 nt, synthetic construct
  misc_feature 1..20: note = source = /note="Description of Artificial Sequence: Synthetic oligonucleotide"
  source 1..20: mol_type = other RNA
tattttatttaccggtccgt

SEQ ID NO: 7667 - RNA, 20 nt, synthetic construct
  misc_feature 1..20: note = source = /note="Description of Artificial Sequence: Synthetic oligonucleotide"
  source 1..20: mol_type = other RNA
ttatttattttatttaccgg

SEQ ID NO: 7668 - RNA, 20 nt, synthetic construct
  misc_feature 1..20: note = source = /note="Description of Artificial Sequence: Synthetic oligonucleotide"
  source 1..20: mol_type = other RNA
atgaattatttattttattt

SEQ ID NO: 7669 - RNA, 20 nt, synthetic construct
  misc_feature 1..20: note = source = /note="Description of Artificial Sequence: Synthetic oligonucleotide"
  source 1..20: mol_type = other RNA
acctcttttcgtgaccctcc

SEQ ID NO: 7670 - RNA, 20 nt, synthetic construct
  misc_feature 1..20: note = source = /note="Description of Artificial Sequence: Synthetic oligonucleotide"
  source 1..20: mol_type = other RNA
gacctcttttcgtgaccctc

SEQ ID NO: 7671 - RNA, 20 nt, synthetic construct
  misc_feature 1..20: note = source = /note="Description of Artificial Sequence: Synthetic oligonucleotide"
  source 1..20: mol_type = other RNA
cgacctcttttcgtgaccct

SEQ ID NO: 7672 - RNA, 20 nt, synthetic construct
  misc_feature 1..20: note = source = /note="Description of Artificial Sequence: Synthetic oligonucleotide"
  source 1..20: mol_type = other RNA
tcgacctcttttcgtgaccc

SEQ ID NO: 7673 - RNA, 20 nt, synthetic construct
  misc_feature 1..20: note = source = /note="Description of Artificial Sequence: Synthetic oligonucleotide"
  source 1..20: mol_type = other RNA
ccgtcgacctcttttcgtga

SEQ ID NO: 7674 - RNA, 20 nt, synthetic construct
  misc_feature 1..20: note = source = /note="Description of Artificial Sequence: Synthetic oligonucleotide"
  source 1..20: mol_type = other RNA
cccgtcgacctcttttcgtg

SEQ ID NO: 7675 - RNA, 20 nt, synthetic construct
  misc_feature 1..20: note = source = /note="Description of Artificial Sequence: Synthetic oligonucleotide"
  source 1..20: mol_type = other RNA
tccttttccttaccccgtcg

SEQ ID NO: 7676 - RNA, 20 nt, synthetic construct
  misc_feature 1..20: note = source = /note="Description of Artificial Sequence: Synthetic oligonucleotide"
  source 1..20: mol_type = other RNA
acggaggtccttttccttac

SEQ ID NO: 7677 - RNA, 20 nt, synthetic construct
  misc_feature 1..20: note = source = /note="Description of Artificial Sequence: Synthetic oligonucleotide"
  source 1..20: mol_type = other RNA
aacggaggtccttttcctta

SEQ ID NO: 7678 - RNA, 20 nt, synthetic construct
  misc_feature 1..20: note = source = /note="Description of Artificial Sequence: Synthetic oligonucleotide"
  source 1..20: mol_type = other RNA
aaacggaggtccttttcctt

SEQ ID NO: 7679 - RNA, 20 nt, synthetic construct
  misc_feature 1..20: note = source = /note="Description of Artificial Sequence: Synthetic oligonucleotide"
  source 1..20: mol_type = other RNA
ttattaaacggaggtccttt

SEQ ID NO: 7680 - RNA, 20 nt, synthetic construct
  misc_feature 1..20: note = source = /note="Description of Artificial Sequence: Synthetic oligonucleotide"
  source 1..20: mol_type = other RNA
ccggtattattaaacggagg

SEQ ID NO: 7681 - RNA, 20 nt, synthetic construct
  misc_feature 1..20: note = source = /note="Description of Artificial Sequence: Synthetic oligonucleotide"
  source 1..20: mol_type = other RNA
gacctcttatatattacttg

SEQ ID NO: 7682 - RNA, 20 nt, synthetic construct
  misc_feature 1..20: note = source = /note="Description of Artificial Sequence: Synthetic oligonucleotide"
  source 1..20: mol_type = other RNA
aaataaaaaaaaatctagag

SEQ ID NO: 7683 - RNA, 20 nt, synthetic construct
  misc_feature 1..20: note = source = /note="Description of Artificial Sequence: Synthetic oligonucleotide"
  source 1..20: mol_type = other RNA
ggtcattaatttaccttatt

SEQ ID NO: 7684 - RNA, 20 nt, synthetic construct
  misc_feature 1..20: note = source = /note="Description of Artificial Sequence: Synthetic oligonucleotide"
  source 1..20: mol_type = other RNA
tcatagagggtcattaattt

SEQ ID NO: 7685 - RNA, 20 nt, synthetic construct
  misc_feature 1..20: note = source = /note="Description of Artificial Sequence: Synthetic oligonucleotide"
  source 1..20: mol_type = other RNA
tcatagagatataaaagtct

SEQ ID NO: 7686 - RNA, 20 nt, synthetic construct
  misc_feature 1..20: note = source = /note="Description of Artificial Sequence: Synthetic oligonucleotide"
  source 1..20: mol_type = other RNA
cccaatacaatttattaaat

SEQ ID NO: 7687 - RNA, 20 nt, synthetic construct
  misc_feature 1..20: note = source = /note="Description of Artificial Sequence: Synthetic oligonucleotide"
  source 1..20: mol_type = other RNA
ctttgttggatgtagttatt

SEQ ID NO: 7688 - RNA, 20 nt, synthetic construct
  misc_feature 1..20: note = source = /note="Description of Artificial Sequence: Synthetic oligonucleotide"
  source 1..20: mol_type = other RNA
tctttgttggatgtagttat

SEQ ID NO: 7689 - RNA, 20 nt, synthetic construct
  misc_feature 1..20: note = source = /note="Description of Artificial Sequence: Synthetic oligonucleotide"
  source 1..20: mol_type = other RNA
gttagaaaacgtcattattt

SEQ ID NO: 7690 - RNA, 20 nt, synthetic construct
  misc_feature 1..20: note = source = /note="Description of Artificial Sequence: Synthetic oligonucleotide"
  source 1..20: mol_type = other RNA
tatatatgtaatttactaca

SEQ ID NO: 7691 - RNA, 20 nt, synthetic construct
  misc_feature 1..20: note = source = /note="Description of Artificial Sequence: Synthetic oligonucleotide"
  source 1..20: mol_type = other RNA
cactacgacgtgaggtcgga

SEQ ID NO: 7692 - RNA, 20 nt, synthetic construct
  misc_feature 1..20: note = source = /note="Description of Artificial Sequence: Synthetic oligonucleotide"
  source 1..20: mol_type = other RNA
acactacgacgtgaggtcgg

SEQ ID NO: 7693 - RNA, 20 nt, synthetic construct
  misc_feature 1..20: note = source = /note="Description of Artificial Sequence: Synthetic oligonucleotide"
  source 1..20: mol_type = other RNA
tcctccacctgtgacgtcac

SEQ ID NO: 7694 - RNA, 20 nt, synthetic construct
  misc_feature 1..20: note = source = /note="Description of Artificial Sequence: Synthetic oligonucleotide"
  source 1..20: mol_type = other RNA
ttagtggacttgggtcctcc

SEQ ID NO: 7695 - RNA, 20 nt, synthetic construct
  misc_feature 1..20: note = source = /note="Description of Artificial Sequence: Synthetic oligonucleotide"
  source 1..20: mol_type = other RNA
ttcttagtggacttgggtcc

SEQ ID NO: 7696 - RNA, 20 nt, synthetic construct
  misc_feature 1..20: note = source = /note="Description of Artificial Sequence: Synthetic oligonucleotide"
  source 1..20: mol_type = other RNA
ttcttcttagtggacttggg

SEQ ID NO: 7697 - RNA, 20 nt, synthetic construct
  misc_feature 1..20: note = source = /note="Description of Artificial Sequence: Synthetic oligonucleotide"
  source 1..20: mol_type = other RNA
gggtcaatgaaccctccgac

SEQ ID NO: 7698 - RNA, 20 nt, synthetic construct
  misc_feature 1..20: note = source = /note="Description of Artificial Sequence: Synthetic oligonucleotide"
  source 1..20: mol_type = other RNA
acattagggtcaatgaaccc

SEQ ID NO: 7699 - RNA, 20 nt, synthetic construct
  misc_feature 1..20: note = source = /note="Description of Artificial Sequence: Synthetic oligonucleotide"
  source 1..20: mol_type = other RNA
tggacattagggtcaatgaa

SEQ ID NO: 7700 - RNA, 20 nt, synthetic construct
  misc_feature 1..20: note = source = /note="Description of Artificial Sequence: Synthetic oligonucleotide"
  source 1..20: mol_type = other RNA
gtggacattagggtcaatga

SEQ ID NO: 7701 - RNA, 20 nt, synthetic construct
  misc_feature 1..20: note = source = /note="Description of Artificial Sequence: Synthetic oligonucleotide"
  source 1..20: mol_type = other RNA
ttaatcgtcccgtaccacca

SEQ ID NO: 7702 - RNA, 20 nt, synthetic construct
  misc_feature 1..20: note = source = /note="Description of Artificial Sequence: Synthetic oligonucleotide"
  source 1..20: mol_type = other RNA
gtttttaatcgtcccgtacc

SEQ ID NO: 7703 - RNA, 20 nt, synthetic construct
  misc_feature 1..20: note = source = /note="Description of Artificial Sequence: Synthetic oligonucleotide"
  source 1..20: mol_type = other RNA
tatgtttttaatcgtcccgt

SEQ ID NO: 7704 - RNA, 20 nt, synthetic construct
  misc_feature 1..20: note = source = /note="Description of Artificial Sequence: Synthetic oligonucleotide"
  source 1..20: mol_type = other RNA
ttttctatgtttttaatcgt

SEQ ID NO: 7705 - RNA, 20 nt, synthetic construct
  misc_feature 1..20: note = source = /note="Description of Artificial Sequence: Synthetic oligonucleotide"
  source 1..20: mol_type = other RNA
tttttctatgtttttaatcg

SEQ ID NO: 7706 - RNA, 20 nt, synthetic construct
  misc_feature 1..20: note = source = /note="Description of Artificial Sequence: Synthetic oligonucleotide"
  source 1..20: mol_type = other RNA
gatctggttggaccggttgt

SEQ ID NO: 7707 - RNA, 20 nt, synthetic construct
  misc_feature 1..20: note = source = /note="Description of Artificial Sequence: Synthetic oligonucleotide"
  source 1..20: mol_type = other RNA
ggtcctcaagatctggttgg

SEQ ID NO: 7708 - RNA, 20 nt, synthetic construct
  misc_feature 1..20: note = source = /note="Description of Artificial Sequence: Synthetic oligonucleotide"
  source 1..20: mol_type = other RNA
ggtcacctagtggactccgg

SEQ ID NO: 7709 - RNA, 20 nt, synthetic construct
  misc_feature 1..20: note = source = /note="Description of Artificial Sequence: Synthetic oligonucleotide"
  source 1..20: mol_type = other RNA
attccggtcacctagtggac

SEQ ID NO: 7710 - RNA, 20 nt, synthetic construct
  misc_feature 1..20: note = source = /note="Description of Artificial Sequence: Synthetic oligonucleotide"
  source 1..20: mol_type = other RNA
gaaacccttcgattccggtc

SEQ ID NO: 7711 - RNA, 20 nt, synthetic construct
  misc_feature 1..20: note = source = /note="Description of Artificial Sequence: Synthetic oligonucleotide"
  source 1..20: mol_type = other RNA
gggtcgtgaaacccttcgat

SEQ ID NO: 7712 - RNA, 20 nt, synthetic construct
  misc_feature 1..20: note = source = /note="Description of Artificial Sequence: Synthetic oligonucleotide"
  source 1..20: mol_type = other RNA
cggatattagggtcgtgaaa

SEQ ID NO: 7713 - RNA, 20 nt, synthetic construct
  misc_feature 1..20: note = source = /note="Description of Artificial Sequence: Synthetic oligonucleotide"
  source 1..20: mol_type = other RNA
gcggatattagggtcgtgaa

SEQ ID NO: 7714 - RNA, 20 nt, synthetic construct
  misc_feature 1..20: note = source = /note="Description of Artificial Sequence: Synthetic oligonucleotide"
  source 1..20: mol_type = other RNA
aaatagactgtccgacccac

SEQ ID NO: 7715 - RNA, 20 nt, synthetic construct
  misc_feature 1..20: note = source = /note="Description of Artificial Sequence: Synthetic oligonucleotide"
  source 1..20: mol_type = other RNA
ttcttaaatagactgtccga

SEQ ID NO: 7716 - RNA, 20 nt, synthetic construct
  misc_feature 1..20: note = source = /note="Description of Artificial Sequence: Synthetic oligonucleotide"
  source 1..20: mol_type = other RNA
attcttaaatagactgtccg

SEQ ID NO: 7717 - RNA, 20 nt, synthetic construct
  misc_feature 1..20: note = source = /note="Description of Artificial Sequence: Synthetic oligonucleotide"
  source 1..20: mol_type = other RNA
gaaaattcttaaatagactg

SEQ ID NO: 7718 - RNA, 20 nt, synthetic construct
  misc_feature 1..20: note = source = /note="Description of Artificial Sequence: Synthetic oligonucleotide"
  source 1..20: mol_type = other RNA
atagtacatcctactgttaa

SEQ ID NO: 7719 - RNA, 20 nt, synthetic construct
  misc_feature 1..20: note = source = /note="Description of Artificial Sequence: Synthetic oligonucleotide"
  source 1..20: mol_type = other RNA
ttgacggtgtttatagtaca

SEQ ID NO: 7720 - RNA, 20 nt, synthetic construct
  misc_feature 1..20: note = source = /note="Description of Artificial Sequence: Synthetic oligonucleotide"
  source 1..20: mol_type = other RNA
ttttgtctatgagagagtac

SEQ ID NO: 7721 - RNA, 20 nt, synthetic construct
  misc_feature 1..20: note = source = /note="Description of Artificial Sequence: Synthetic oligonucleotide"
  source 1..20: mol_type = other RNA
tgatacaaaccgttcgtaca

SEQ ID NO: 7722 - RNA, 20 nt, synthetic construct
  misc_feature 1..20: note = source = /note="Description of Artificial Sequence: Synthetic oligonucleotide"
  source 1..20: mol_type = other RNA
atgatacaaaccgttcgtac

SEQ ID NO: 7723 - RNA, 20 nt, synthetic construct
  misc_feature 1..20: note = source = /note="Description of Artificial Sequence: Synthetic oligonucleotide"
  source 1..20: mol_type = other RNA
cgaactatgatatgatacaa

SEQ ID NO: 7724 - RNA, 20 nt, synthetic construct
  misc_feature 1..20: note = source = /note="Description of Artificial Sequence: Synthetic oligonucleotide"
  source 1..20: mol_type = other RNA
acgtttaattttgacgttgt

SEQ ID NO: 7725 - RNA, 20 nt, synthetic construct
  misc_feature 1..20: note = source = /note="Description of Artificial Sequence: Synthetic oligonucleotide"
  source 1..20: mol_type = other RNA
gtatcttttactttacactt

SEQ ID NO: 7726 - RNA, 20 nt, synthetic construct
  misc_feature 1..20: note = source = /note="Description of Artificial Sequence: Synthetic oligonucleotide"
  source 1..20: mol_type = other RNA
attttttacctgttccctgt

SEQ ID NO: 7727 - RNA, 20 nt, synthetic construct
  misc_feature 1..20: note = source = /note="Description of Artificial Sequence: Synthetic oligonucleotide"
  source 1..20: mol_type = other RNA
tgtatgattttttacctgtt

SEQ ID NO: 7728 - RNA, 20 nt, synthetic construct
  misc_feature 1..20: note = source = /note="Description of Artificial Sequence: Synthetic oligonucleotide"
  source 1..20: mol_type = other RNA
gtgtatgattttttacctgt

SEQ ID NO: 7729 - RNA, 20 nt, synthetic construct
  misc_feature 1..20: note = source = /note="Description of Artificial Sequence: Synthetic oligonucleotide"
  source 1..20: mol_type = other RNA
ttattggtgtatgatttttt

SEQ ID NO: 7730 - RNA, 20 nt, synthetic construct
  misc_feature 1..20: note = source = /note="Description of Artificial Sequence: Synthetic oligonucleotide"
  source 1..20: mol_type = other RNA
taaaacaaaagaattgtata

SEQ ID NO: 7731 - RNA, 20 nt, synthetic construct
  misc_feature 1..20: note = source = /note="Description of Artificial Sequence: Synthetic oligonucleotide"
  source 1..20: mol_type = other RNA
atctagaagtcataaaagat

SEQ ID NO: 7732 - RNA, 20 nt, synthetic construct
  misc_feature 1..20: note = source = /note="Description of Artificial Sequence: Synthetic oligonucleotide"
  source 1..20: mol_type = other RNA
aatctagaagtcataaaaga

SEQ ID NO: 7733 - RNA, 20 nt, synthetic construct
  misc_feature 1..20: note = source = /note="Description of Artificial Sequence: Synthetic oligonucleotide"
  source 1..20: mol_type = other RNA
acttaaaaaaatctaatgac

SEQ ID NO: 7734 - RNA, 20 nt, synthetic construct
  misc_feature 1..20: note = source = /note="Description of Artificial Sequence: Synthetic oligonucleotide"
  source 1..20: mol_type = other RNA
acttaaattataaacttatg

SEQ ID NO: 7735 - RNA, 20 nt, synthetic construct
  misc_feature 1..20: note = source = /note="Description of Artificial Sequence: Synthetic oligonucleotide"
  source 1..20: mol_type = other RNA
aggacttttttactatttca

SEQ ID NO: 7736 - RNA, 20 nt, synthetic construct
  misc_feature 1..20: note = source = /note="Description of Artificial Sequence: Synthetic oligonucleotide"
  source 1..20: mol_type = other RNA
gaggacttttttactatttc

SEQ ID NO: 7737 - RNA, 20 nt, synthetic construct
  misc_feature 1..20: note = source = /note="Description of Artificial Sequence: Synthetic oligonucleotide"
  source 1..20: mol_type = other RNA
atgaactataatcttgttga

SEQ ID NO: 7738 - RNA, 20 nt, synthetic construct
  misc_feature 1..20: note = source = /note="Description of Artificial Sequence: Synthetic oligonucleotide"
  source 1..20: mol_type = other RNA
tatgaactataatcttgttg

SEQ ID NO: 7739 - RNA, 20 nt, synthetic construct
  misc_feature 1..20: note = source = /note="Description of Artificial Sequence: Synthetic oligonucleotide"
  source 1..20: mol_type = other RNA
tatacgatgttctattccta

SEQ ID NO: 7740 - RNA, 20 nt, synthetic construct
  misc_feature 1..20: note = source = /note="Description of Artificial Sequence: Synthetic oligonucleotide"
  source 1..20: mol_type = other RNA
ttatacgatgttctattcct

SEQ ID NO: 7741 - RNA, 20 nt, synthetic construct
  misc_feature 1..20: note = source = /note="Description of Artificial Sequence: Synthetic oligonucleotide"
  source 1..20: mol_type = other RNA
gtctttatacgatgttctat

SEQ ID NO: 7742 - RNA, 20 nt, synthetic construct
  misc_feature 1..20: note = source = /note="Description of Artificial Sequence: Synthetic oligonucleotide"
  source 1..20: mol_type = other RNA
atattataattatactagtt

SEQ ID NO: 7743 - RNA, 20 nt, synthetic construct
  misc_feature 1..20: note = source = /note="Description of Artificial Sequence: Synthetic oligonucleotide"
  source 1..20: mol_type = other RNA
aagactttttcttaacatac

SEQ ID NO: 7744 - RNA, 20 nt, synthetic construct
  misc_feature 1..20: note = source = /note="Description of Artificial Sequence: Synthetic oligonucleotide"
  source 1..20: mol_type = other RNA
taagactttttcttaacata

SEQ ID NO: 7745 - RNA, 20 nt, synthetic construct
  misc_feature 1..20: note = source = /note="Description of Artificial Sequence: Synthetic oligonucleotide"
  source 1..20: mol_type = other RNA
ataagactttttcttaacat

SEQ ID NO: 7746 - RNA, 20 nt, synthetic construct
  misc_feature 1..20: note = source = /note="Description of Artificial Sequence: Synthetic oligonucleotide"
  source 1..20: mol_type = other RNA
ttatttgtttaacccatcgg

SEQ ID NO: 7747 - RNA, 20 nt, synthetic construct
  misc_feature 1..20: note = source = /note="Description of Artificial Sequence: Synthetic oligonucleotide"
  source 1..20: mol_type = other RNA
aaacctttttatttgtttaa

SEQ ID NO: 7748 - RNA, 20 nt, synthetic construct
  misc_feature 1..20: note = source = /note="Description of Artificial Sequence: Synthetic oligonucleotide"
  source 1..20: mol_type = other RNA
taaacctttttatttgttta

SEQ ID NO: 7749 - RNA, 20 nt, synthetic construct
  misc_feature 1..20: note = source = /note="Description of Artificial Sequence: Synthetic oligonucleotide"
  source 1..20: mol_type = other RNA
tcaactgaggtttcaagtaa

SEQ ID NO: 7750 - RNA, 20 nt, synthetic construct
  misc_feature 1..20: note = source = /note="Description of Artificial Sequence: Synthetic oligonucleotide"
  source 1..20: mol_type = other RNA
gtcttataaaactccttaat

SEQ ID NO: 7751 - RNA, 20 nt, synthetic construct
  misc_feature 1..20: note = source = /note="Description of Artificial Sequence: Synthetic oligonucleotide"
  source 1..20: mol_type = other RNA
tcatgaacgtcttataaaac

SEQ ID NO: 7752 - RNA, 20 nt, synthetic construct
  misc_feature 1..20: note = source = /note="Description of Artificial Sequence: Synthetic oligonucleotide"
  source 1..20: mol_type = other RNA
attcatgtttttgttttgtt

SEQ ID NO: 7753 - RNA, 20 nt, synthetic construct
  misc_feature 1..20: note = source = /note="Description of Artificial Sequence: Synthetic oligonucleotide"
  source 1..20: mol_type = other RNA
tattcatgtttttgttttgt

SEQ ID NO: 7754 - RNA, 20 nt, synthetic construct
  misc_feature 1..20: note = source = /note="Description of Artificial Sequence: Synthetic oligonucleotide"
  source 1..20: mol_type = other RNA
tccttattcaaaaattttac

SEQ ID NO: 7755 - RNA, 20 nt, synthetic construct
  misc_feature 1..20: note = source = /note="Description of Artificial Sequence: Synthetic oligonucleotide"
  source 1..20: mol_type = other RNA
tatcttctttaattatgtga

SEQ ID NO: 7756 - RNA, 20 nt, synthetic construct
  misc_feature 1..20: note = source = /note="Description of Artificial Sequence: Synthetic oligonucleotide"
  source 1..20: mol_type = other RNA
gttggtcagtcttcaaaatg

SEQ ID NO: 7757 - RNA, 20 nt, synthetic construct
  misc_feature 1..20: note = source = /note="Description of Artificial Sequence: Synthetic oligonucleotide"
  source 1..20: mol_type = other RNA
gatctcttagttcatttttt

SEQ ID NO: 7758 - RNA, 20 nt, synthetic construct
  misc_feature 1..20: note = source = /note="Description of Artificial Sequence: Synthetic oligonucleotide"
  source 1..20: mol_type = other RNA
gtctatttttctaatatatg

SEQ ID NO: 7759 - RNA, 20 nt, synthetic construct
  misc_feature 1..20: note = source = /note="Description of Artificial Sequence: Synthetic oligonucleotide"
  source 1..20: mol_type = other RNA
agaaagactattttcttttt

SEQ ID NO: 7760 - RNA, 20 nt, synthetic construct
  misc_feature 1..20: note = source = /note="Description of Artificial Sequence: Synthetic oligonucleotide"
  source 1..20: mol_type = other RNA
aagaaagactattttctttt

SEQ ID NO: 7761 - RNA, 20 nt, synthetic construct
  misc_feature 1..20: note = source = /note="Description of Artificial Sequence: Synthetic oligonucleotide"
  source 1..20: mol_type = other RNA
aaaaattaatccattgtata

SEQ ID NO: 7762 - RNA, 20 nt, synthetic construct
  misc_feature 1..20: note = source = /note="Description of Artificial Sequence: Synthetic oligonucleotide"
  source 1..20: mol_type = other RNA
atagagaaagccagaagaaa

SEQ ID NO: 7763 - RNA, 20 nt, synthetic construct
  misc_feature 1..20: note = source = /note="Description of Artificial Sequence: Synthetic oligonucleotide"
  source 1..20: mol_type = other RNA
cagacatgtggtttgggggt

SEQ ID NO: 7764 - RNA, 20 nt, synthetic construct
  misc_feature 1..20: note = source = /note="Description of Artificial Sequence: Synthetic oligonucleotide"
  source 1..20: mol_type = other RNA
ttcatgatgcgaataatgga

SEQ ID NO: 7765 - RNA, 20 nt, synthetic construct
  misc_feature 1..20: note = source = /note="Description of Artificial Sequence: Synthetic oligonucleotide"
  source 1..20: mol_type = other RNA
attcatgatgcgaataatgg

SEQ ID NO: 7766 - RNA, 20 nt, synthetic construct
  misc_feature 1..20: note = source = /note="Description of Artificial Sequence: Synthetic oligonucleotide"
  source 1..20: mol_type = other RNA
aactcctaccctcttccctc

SEQ ID NO: 7767 - RNA, 20 nt, synthetic construct
  misc_feature 1..20: note = source = /note="Description of Artificial Sequence: Synthetic oligonucleotide"
  source 1..20: mol_type = other RNA
tatgaaactcctaccctctt

SEQ ID NO: 7768 - RNA, 20 nt, synthetic construct
  misc_feature 1..20: note = source = /note="Description of Artificial Sequence: Synthetic oligonucleotide"
  source 1..20: mol_type = other RNA
ctatgaaactcctaccctct

SEQ ID NO: 7769 - RNA, 20 nt, synthetic construct
  misc_feature 1..20: note = source = /note="Description of Artificial Sequence: Synthetic oligonucleotide"
  source 1..20: mol_type = other RNA
tcgtccctatgaaactccta

SEQ ID NO: 7770 - RNA, 20 nt, synthetic construct
  misc_feature 1..20: note = source = /note="Description of Artificial Sequence: Synthetic oligonucleotide"
  source 1..20: mol_type = other RNA
gtcgtccctatgaaactcct

SEQ ID NO: 7771 - RNA, 20 nt, synthetic construct
  misc_feature 1..20: note = source = /note="Description of Artificial Sequence: Synthetic oligonucleotide"
  source 1..20: mol_type = other RNA
gtctgtcgtccctatgaaac

SEQ ID NO: 7772 - RNA, 20 nt, synthetic construct
  misc_feature 1..20: note = source = /note="Description of Artificial Sequence: Synthetic oligonucleotide"
  source 1..20: mol_type = other RNA
tcccccttgttgtctgtcgt

SEQ ID NO: 7773 - RNA, 20 nt, synthetic construct
  misc_feature 1..20: note = source = /note="Description of Artificial Sequence: Synthetic oligonucleotide"
  source 1..20: mol_type = other RNA
ctcccccttgttgtctgtcg

SEQ ID NO: 7774 - RNA, 20 nt, synthetic construct
  misc_feature 1..20: note = source = /note="Description of Artificial Sequence: Synthetic oligonucleotide"
  source 1..20: mol_type = other RNA
ttgtgtacctgtgtttctcc

SEQ ID NO: 7775 - RNA, 20 nt, synthetic construct
  misc_feature 1..20: note = source = /note="Description of Artificial Sequence: Synthetic oligonucleotide"
  source 1..20: mol_type = other RNA
cttgtgtacctgtgtttctc

SEQ ID NO: 7776 - RNA, 20 nt, synthetic construct
  misc_feature 1..20: note = source = /note="Description of Artificial Sequence: Synthetic oligonucleotide"
  source 1..20: mol_type = other RNA
tcttgtgtacctgtgtttct

SEQ ID NO: 7777 - RNA, 20 nt, synthetic construct
  misc_feature 1..20: note = source = /note="Description of Artificial Sequence: Synthetic oligonucleotide"
  source 1..20: mol_type = other RNA
ttcttgtgtacctgtgtttc

SEQ ID NO: 7778 - RNA, 20 nt, synthetic construct
  misc_feature 1..20: note = source = /note="Description of Artificial Sequence: Synthetic oligonucleotide"
  source 1..20: mol_type = other RNA
tcgatttgtcgttcttgtgt

SEQ ID NO: 7779 - RNA, 20 nt, synthetic construct
  misc_feature 1..20: note = source = /note="Description of Artificial Sequence: Synthetic oligonucleotide"
  source 1..20: mol_type = other RNA
tatggtgtacaagagaattc

SEQ ID NO: 7780 - RNA, 20 nt, synthetic construct
  misc_feature 1..20: note = source = /note="Description of Artificial Sequence: Synthetic oligonucleotide"
  source 1..20: mol_type = other RNA
ataggatttgtttgattgtt

SEQ ID NO: 7781 - RNA, 20 nt, synthetic construct
  misc_feature 1..20: note = source = /note="Description of Artificial Sequence: Synthetic oligonucleotide"
  source 1..20: mol_type = other RNA
tcgttgtacctacctcgacc

SEQ ID NO: 7782 - RNA, 20 nt, synthetic construct
  misc_feature 1..20: note = source = /note="Description of Artificial Sequence: Synthetic oligonucleotide"
  source 1..20: mol_type = other RNA
acgtcgttgtacctacctcg

SEQ ID NO: 7783 - RNA, 20 nt, synthetic construct
  misc_feature 1..20: note = source = /note="Description of Artificial Sequence: Synthetic oligonucleotide"
  source 1..20: mol_type = other RNA
caagacacgtcgttgtacct

SEQ ID NO: 7784 - RNA, 20 nt, synthetic construct
  misc_feature 1..20: note = source = /note="Description of Artificial Sequence: Synthetic oligonucleotide"
  source 1..20: mol_type = other RNA
agcacaagacacgtcgttgt

SEQ ID NO: 7785 - RNA, 20 nt, synthetic construct
  misc_feature 1..20: note = source = /note="Description of Artificial Sequence: Synthetic oligonucleotide"
  source 1..20: mol_type = other RNA
tttcacaatgtatatgtggt

SEQ ID NO: 7786 - RNA, 20 nt, synthetic construct
  misc_feature 1..20: note = source = /note="Description of Artificial Sequence: Synthetic oligonucleotide"
  source 1..20: mol_type = other RNA
ttacaggcattcatcatctg

SEQ ID NO: 7787 - RNA, 20 nt, synthetic construct
  misc_feature 1..20: note = source = /note="Description of Artificial Sequence: Synthetic oligonucleotide"
  source 1..20: mol_type = other RNA
ataattactatcgcttctgt

SEQ ID NO: 7788 - RNA, 20 nt, synthetic construct
  misc_feature 1..20: note = source = /note="Description of Artificial Sequence: Synthetic oligonucleotide"
  source 1..20: mol_type = other RNA
atatttagtaagatggtatt

SEQ ID NO: 7789 - RNA, 20 nt, synthetic construct
  misc_feature 1..20: note = source = /note="Description of Artificial Sequence: Synthetic oligonucleotide"
  source 1..20: mol_type = other RNA
ataagccgtataatgggttt

SEQ ID NO: 7790 - RNA, 20 nt, synthetic construct
  misc_feature 1..20: note = source = /note="Description of Artificial Sequence: Synthetic oligonucleotide"
  source 1..20: mol_type = other RNA
aataagccgtataatgggtt

SEQ ID NO: 7791 - RNA, 20 nt, synthetic construct
  misc_feature 1..20: note = source = /note="Description of Artificial Sequence: Synthetic oligonucleotide"
  source 1..20: mol_type = other RNA
ctggctcgttagggtaataa

SEQ ID NO: 7792 - RNA, 20 nt, synthetic construct
  misc_feature 1..20: note = source = /note="Description of Artificial Sequence: Synthetic oligonucleotide"
  source 1..20: mol_type = other RNA
ttcgtcacgccattaaagtc

SEQ ID NO: 7793 - RNA, 20 nt, synthetic construct
  misc_feature 1..20: note = source = /note="Description of Artificial Sequence: Synthetic oligonucleotide"
  source 1..20: mol_type = other RNA
tcgacaacacctttcgtcac

SEQ ID NO: 7794 - RNA, 20 nt, synthetic construct
  misc_feature 1..20: note = source = /note="Description of Artificial Sequence: Synthetic oligonucleotide"
  source 1..20: mol_type = other RNA
catttgatcaagtcgacaac

SEQ ID NO: 7795 - RNA, 20 nt, synthetic construct
  misc_feature 1..20: note = source = /note="Description of Artificial Sequence: Synthetic oligonucleotide"
  source 1..20: mol_type = other RNA
gaataggggaataacgaaca

SEQ ID NO: 7796 - RNA, 20 nt, synthetic construct
  misc_feature 1..20: note = source = /note="Description of Artificial Sequence: Synthetic oligonucleotide"
  source 1..20: mol_type = other RNA
tgaataggggaataacgaac

SEQ ID NO: 7797 - RNA, 20 nt, synthetic construct
  misc_feature 1..20: note = source = /note="Description of Artificial Sequence: Synthetic oligonucleotide"
  source 1..20: mol_type = other RNA
aatcattccacgtctctttt

SEQ ID NO: 7798 - RNA, 20 nt, synthetic construct
  misc_feature 1..20: note = source = /note="Description of Artificial Sequence: Synthetic oligonucleotide"
  source 1..20: mol_type = other RNA
taatcattccacgtctcttt

SEQ ID NO: 7799 - RNA, 20 nt, synthetic construct
  misc_feature 1..20: note = source = /note="Description of Artificial Sequence: Synthetic oligonucleotide"
  source 1..20: mol_type = other RNA
ggagtctatagtagaaggga

SEQ ID NO: 7800 - RNA, 20 nt, synthetic construct
  misc_feature 1..20: note = source = /note="Description of Artificial Sequence: Synthetic oligonucleotide"
  source 1..20: mol_type = other RNA
caaagtctcgaagtacggaa

SEQ ID NO: 7801 - RNA, 20 nt, synthetic construct
  misc_feature 1..20: note = source = /note="Description of Artificial Sequence: Synthetic oligonucleotide"
  source 1..20: mol_type = other RNA
gttttcttccccccgcatac

SEQ ID NO: 7802 - RNA, 20 nt, synthetic construct
  misc_feature 1..20: note = source = /note="Description of Artificial Sequence: Synthetic oligonucleotide"
  source 1..20: mol_type = other RNA
atgtttttctctagaggggc

SEQ ID NO: 7803 - RNA, 20 nt, synthetic construct
  misc_feature 1..20: note = source = /note="Description of Artificial Sequence: Synthetic oligonucleotide"
  source 1..20: mol_type = other RNA
ttctatgtttttctctagag

SEQ ID NO: 7804 - RNA, 20 nt, synthetic construct
  misc_feature 1..20: note = source = /note="Description of Artificial Sequence: Synthetic oligonucleotide"
  source 1..20: mol_type = other RNA
attctatgtttttctctaga

SEQ ID NO: 7805 - RNA, 20 nt, synthetic construct
  misc_feature 1..20: note = source = /note="Description of Artificial Sequence: Synthetic oligonucleotide"
  source 1..20: mol_type = other RNA
gattctatgtttttctctag

SEQ ID NO: 7806 - RNA, 20 nt, synthetic construct
  misc_feature 1..20: note = source = /note="Description of Artificial Sequence: Synthetic oligonucleotide"
  source 1..20: mol_type = other RNA
ctttatgaaaaaccctttct

SEQ ID NO: 7807 - RNA, 20 nt, synthetic construct
  misc_feature 1..20: note = source = /note="Description of Artificial Sequence: Synthetic oligonucleotide"
  source 1..20: mol_type = other RNA
tattccaggtgacagaatag

SEQ ID NO: 7808 - RNA, 20 nt, synthetic construct
  misc_feature 1..20: note = source = /note="Description of Artificial Sequence: Synthetic oligonucleotide"
  source 1..20: mol_type = other RNA
atattccaggtgacagaata

SEQ ID NO: 7809 - RNA, 20 nt, synthetic construct
  misc_feature 1..20: note = source = /note="Description of Artificial Sequence: Synthetic oligonucleotide"
  source 1..20: mol_type = other RNA
aatattccaggtgacagaat

SEQ ID NO: 7810 - RNA, 20 nt, synthetic construct
  misc_feature 1..20: note = source = /note="Description of Artificial Sequence: Synthetic oligonucleotide"
  source 1..20: mol_type = other RNA
ttcagtgttatcaatattcc

SEQ ID NO: 7811 - RNA, 20 nt, synthetic construct
  misc_feature 1..20: note = source = /note="Description of Artificial Sequence: Synthetic oligonucleotide"
  source 1..20: mol_type = other RNA
ccaaatacacctgagagata

SEQ ID NO: 7812 - RNA, 20 nt, synthetic construct
  misc_feature 1..20: note = source = /note="Description of Artificial Sequence: Synthetic oligonucleotide"
  source 1..20: mol_type = other RNA
ctggcttaaacttgcctgca

SEQ ID NO: 7813 - RNA, 20 nt, synthetic construct
  misc_feature 1..20: note = source = /note="Description of Artificial Sequence: Synthetic oligonucleotide"
  source 1..20: mol_type = other RNA
tcatattctctttaacacac

SEQ ID NO: 7814 - RNA, 20 nt, synthetic construct
  misc_feature 1..20: note = source = /note="Description of Artificial Sequence: Synthetic oligonucleotide"
  source 1..20: mol_type = other RNA
aggttccctttgttatcaaa

SEQ ID NO: 7815 - RNA, 20 nt, synthetic construct
  misc_feature 1..20: note = source = /note="Description of Artificial Sequence: Synthetic oligonucleotide"
  source 1..20: mol_type = other RNA
ccttcccctccagcccttta

SEQ ID NO: 7816 - RNA, 20 nt, synthetic construct
  misc_feature 1..20: note = source = /note="Description of Artificial Sequence: Synthetic oligonucleotide"
  source 1..20: mol_type = other RNA
ggtgcagtagctttttaaaa

SEQ ID NO: 7817 - RNA, 20 nt, synthetic construct
  misc_feature 1..20: note = source = /note="Description of Artificial Sequence: Synthetic oligonucleotide"
  source 1..20: mol_type = other RNA
tggtgcagtagctttttaaa

SEQ ID NO: 7818 - RNA, 20 nt, synthetic construct
  misc_feature 1..20: note = source = /note="Description of Artificial Sequence: Synthetic oligonucleotide"
  source 1..20: mol_type = other RNA
agggtttcacgaccctaatg

SEQ ID NO: 7819 - RNA, 20 nt, synthetic construct
  misc_feature 1..20: note = source = /note="Description of Artificial Sequence: Synthetic oligonucleotide"
  source 1..20: mol_type = other RNA
ggaaccggagggtttcacga

SEQ ID NO: 7820 - RNA, 20 nt, synthetic construct
  misc_feature 1..20: note = source = /note="Description of Artificial Sequence: Synthetic oligonucleotide"
  source 1..20: mol_type = other RNA
cggaaccggagggtttcacg

SEQ ID NO: 7821 - RNA, 20 nt, synthetic construct
  misc_feature 1..20: note = source = /note="Description of Artificial Sequence: Synthetic oligonucleotide"
  source 1..20: mol_type = other RNA
gagtccactagacggacgga

SEQ ID NO: 7822 - RNA, 20 nt, synthetic construct
  misc_feature 1..20: note = source = /note="Description of Artificial Sequence: Synthetic oligonucleotide"
  source 1..20: mol_type = other RNA
ccagaacttgaggactggag

SEQ ID NO: 7823 - RNA, 20 nt, synthetic construct
  misc_feature 1..20: note = source = /note="Description of Artificial Sequence: Synthetic oligonucleotide"
  source 1..20: mol_type = other RNA
aaaatgatacaaccggtccg

SEQ ID NO: 7824 - RNA, 20 nt, synthetic construct
  misc_feature 1..20: note = source = /note="Description of Artificial Sequence: Synthetic oligonucleotide"
  source 1..20: mol_type = other RNA
ccccaaaatgatacaaccgg

SEQ ID NO: 7825 - RNA, 20 nt, synthetic construct
  misc_feature 1..20: note = source = /note="Description of Artificial Sequence: Synthetic oligonucleotide"
  source 1..20: mol_type = other RNA
ctctaccccaaaatgataca

SEQ ID NO: 7826 - RNA, 20 nt, synthetic construct
  misc_feature 1..20: note = source = /note="Description of Artificial Sequence: Synthetic oligonucleotide"
  source 1..20: mol_type = other RNA
aacataaaaatcatctctac

SEQ ID NO: 7827 - RNA, 20 nt, synthetic construct
  misc_feature 1..20: note = source = /note="Description of Artificial Sequence: Synthetic oligonucleotide"
  source 1..20: mol_type = other RNA
aaacataaaaatcatctcta

SEQ ID NO: 7828 - RNA, 20 nt, synthetic construct
  misc_feature 1..20: note = source = /note="Description of Artificial Sequence: Synthetic oligonucleotide"
  source 1..20: mol_type = other RNA
aaaacataaaaatcatctct

SEQ ID NO: 7829 - RNA, 20 nt, synthetic construct
  misc_feature 1..20: note = source = /note="Description of Artificial Sequence: Synthetic oligonucleotide"
  source 1..20: mol_type = other RNA
agggttcatcgactctaatg

SEQ ID NO: 7830 - RNA, 20 nt, synthetic construct
  misc_feature 1..20: note = source = /note="Description of Artificial Sequence: Synthetic oligonucleotide"
  source 1..20: mol_type = other RNA
gtgacgttggagacggaggg

SEQ ID NO: 7831 - RNA, 20 nt, synthetic construct
  misc_feature 1..20: note = source = /note="Description of Artificial Sequence: Synthetic oligonucleotide"
  source 1..20: mol_type = other RNA
cctcacgtcgccgtgttaga

SEQ ID NO: 7832 - RNA, 20 nt, synthetic construct
  misc_feature 1..20: note = source = /note="Description of Artificial Sequence: Synthetic oligonucleotide"
  source 1..20: mol_type = other RNA
aacgggtccgacctcacgtc

SEQ ID NO: 7833 - RNA, 20 nt, synthetic construct
  misc_feature 1..20: note = source = /note="Description of Artificial Sequence: Synthetic oligonucleotide"
  source 1..20: mol_type = other RNA
agagtgagagaacgggtccg

SEQ ID NO: 7834 - RNA, 20 nt, synthetic construct
  misc_feature 1..20: note = source = /note="Description of Artificial Sequence: Synthetic oligonucleotide"
  source 1..20: mol_type = other RNA
cctcagagtgagagaacggg

SEQ ID NO: 7835 - RNA, 20 nt, synthetic construct
  misc_feature 1..20: note = source = /note="Description of Artificial Sequence: Synthetic oligonucleotide"
  source 1..20: mol_type = other RNA
aaaaaaaaaaaaaaaactct

SEQ ID NO: 7836 - RNA, 20 nt, synthetic construct
  misc_feature 1..20: note = source = /note="Description of Artificial Sequence: Synthetic oligonucleotide"
  source 1..20: mol_type = other RNA
tcaaaattaccagctaatgt

SEQ ID NO: 7837 - RNA, 20 nt, synthetic construct
  misc_feature 1..20: note = source = /note="Description of Artificial Sequence: Synthetic oligonucleotide"
  source 1..20: mol_type = other RNA
atcaaaattaccagctaatg

SEQ ID NO: 7838 - RNA, 20 nt, synthetic construct
  misc_feature 1..20: note = source = /note="Description of Artificial Sequence: Synthetic oligonucleotide"
  source 1..20: mol_type = other RNA
tttatggtcatggagaacaa

SEQ ID NO: 7839 - RNA, 20 nt, synthetic construct
  misc_feature 1..20: note = source = /note="Description of Artificial Sequence: Synthetic oligonucleotide"
  source 1..20: mol_type = other RNA
atttatggtcatggagaaca

SEQ ID NO: 7840 - RNA, 20 nt, synthetic construct
  misc_feature 1..20: note = source = /note="Description of Artificial Sequence: Synthetic oligonucleotide"
  source 1..20: mol_type = other RNA
ctctaaaatatttatggtca

SEQ ID NO: 7841 - RNA, 20 nt, synthetic construct
  misc_feature 1..20: note = source = /note="Description of Artificial Sequence: Synthetic oligonucleotide"
  source 1..20: mol_type = other RNA
tagcaactctaaaatattta

SEQ ID NO: 7842 - RNA, 20 nt, synthetic construct
  misc_feature 1..20: note = source = /note="Description of Artificial Sequence: Synthetic oligonucleotide"
  source 1..20: mol_type = other RNA
gtgacaactgacagctactc

SEQ ID NO: 7843 - RNA, 20 nt, synthetic construct
  misc_feature 1..20: note = source = /note="Description of Artificial Sequence: Synthetic oligonucleotide"
  source 1..20: mol_type = other RNA
gaataattgtggataaatat

SEQ ID NO: 7844 - RNA, 20 nt, synthetic construct
  misc_feature 1..20: note = source = /note="Description of Artificial Sequence: Synthetic oligonucleotide"
  source 1..20: mol_type = other RNA
tatatcttaaggaataattg

SEQ ID NO: 7845 - RNA, 20 nt, synthetic construct
  misc_feature 1..20: note = source = /note="Description of Artificial Sequence: Synthetic oligonucleotide"
  source 1..20: mol_type = other RNA
aaaaatactaatatatctta

SEQ ID NO: 7846 - RNA, 20 nt, synthetic construct
  misc_feature 1..20: note = source = /note="Description of Artificial Sequence: Synthetic oligonucleotide"
  source 1..20: mol_type = other RNA
cagaaatgtactgagacaca

SEQ ID NO: 7847 - RNA, 20 nt, synthetic construct
  misc_feature 1..20: note = source = /note="Description of Artificial Sequence: Synthetic oligonucleotide"
  source 1..20: mol_type = other RNA
agcaaatttatcttcagata

SEQ ID NO: 7848 - RNA, 20 nt, synthetic construct
  misc_feature 1..20: note = source = /note="Description of Artificial Sequence: Synthetic oligonucleotide"
  source 1..20: mol_type = other RNA
gcaaatttatcttcagatat

SEQ ID NO: 7849 - RNA, 20 nt, synthetic construct
  misc_feature 1..20: note = source = /note="Description of Artificial Sequence: Synthetic oligonucleotide"
  source 1..20: mol_type = other RNA
ctttttttaaatcttgagtc

SEQ ID NO: 7850 - RNA, 20 nt, synthetic construct
  misc_feature 1..20: note = source = /note="Description of Artificial Sequence: Synthetic oligonucleotide"
  source 1..20: mol_type = other RNA
agtctggcagcaatttgtaa

SEQ ID NO: 7851 - RNA, 20 nt, synthetic construct
  misc_feature 1..20: note = source = /note="Description of Artificial Sequence: Synthetic oligonucleotide"
  source 1..20: mol_type = other RNA
gctctttgtatattatctcc

SEQ ID NO: 7852 - RNA, 20 nt, synthetic construct
  misc_feature 1..20: note = source = /note="Description of Artificial Sequence: Synthetic oligonucleotide"
  source 1..20: mol_type = other RNA
tatctcctggagagacagct

SEQ ID NO: 7853 - RNA, 20 nt, synthetic construct
  misc_feature 1..20: note = source = /note="Description of Artificial Sequence: Synthetic oligonucleotide"
  source 1..20: mol_type = other RNA
aatgagaaaataacgaccat

SEQ ID NO: 7854 - RNA, 20 nt, synthetic construct
  misc_feature 1..20: note = source = /note="Description of Artificial Sequence: Synthetic oligonucleotide"
  source 1..20: mol_type = other RNA
tttaaatattttttaattca

SEQ ID NO: 7855 - RNA, 20 nt, synthetic construct
  misc_feature 1..20: note = source = /note="Description of Artificial Sequence: Synthetic oligonucleotide"
  source 1..20: mol_type = other RNA
tattagtttcacaagatttc

SEQ ID NO: 7856 - RNA, 20 nt, synthetic construct
  misc_feature 1..20: note = source = /note="Description of Artificial Sequence: Synthetic oligonucleotide"
  source 1..20: mol_type = other RNA
tcacaagatttctggctaat

SEQ ID NO: 7857 - RNA, 20 nt, synthetic construct
  misc_feature 1..20: note = source = /note="Description of Artificial Sequence: Synthetic oligonucleotide"
  source 1..20: mol_type = other RNA
cacaagatttctggctaata

SEQ ID NO: 7858 - RNA, 20 nt, synthetic construct
  misc_feature 1..20: note = source = /note="Description of Artificial Sequence: Synthetic oligonucleotide"
  source 1..20: mol_type = other RNA
tatcttcagtcttcatgagt

SEQ ID NO: 7859 - RNA, 20 nt, synthetic construct
  misc_feature 1..20: note = source = /note="Description of Artificial Sequence: Synthetic oligonucleotide"
  source 1..20: mol_type = other RNA
atcttcagtcttcatgagtt

SEQ ID NO: 7860 - RNA, 20 nt, synthetic construct
  misc_feature 1..20: note = source = /note="Description of Artificial Sequence: Synthetic oligonucleotide"
  source 1..20: mol_type = other RNA
tcttcagtcttcatgagttg

SEQ ID NO: 7861 - RNA, 20 nt, synthetic construct
  misc_feature 1..20: note = source = /note="Description of Artificial Sequence: Synthetic oligonucleotide"
  source 1..20: mol_type = other RNA
cttcagtcttcatgagttgg

SEQ ID NO: 7862 - RNA, 20 nt, synthetic construct
  misc_feature 1..20: note = source = /note="Description of Artificial Sequence: Synthetic oligonucleotide"
  source 1..20: mol_type = other RNA
cttttctccatttatacatt

SEQ ID NO: 7863 - RNA, 20 nt, synthetic construct
  misc_feature 1..20: note = source = /note="Description of Artificial Sequence: Synthetic oligonucleotide"
  source 1..20: mol_type = other RNA
ttgattaaaaaatatgatac

SEQ ID NO: 7864 - RNA, 20 nt, synthetic construct
  misc_feature 1..20: note = source = /note="Description of Artificial Sequence: Synthetic oligonucleotide"
  source 1..20: mol_type = other RNA
ggcatacctcagagatattg

SEQ ID NO: 7865 - RNA, 20 nt, synthetic construct
  misc_feature 1..20: note = source = /note="Description of Artificial Sequence: Synthetic oligonucleotide"
  source 1..20: mol_type = other RNA
gcatacctcagagatattgt

SEQ ID NO: 7866 - RNA, 20 nt, synthetic construct
  misc_feature 1..20: note = source = /note="Description of Artificial Sequence: Synthetic oligonucleotide"
  source 1..20: mol_type = other RNA
cctcagagatattgtgggtt

SEQ ID NO: 7867 - RNA, 20 nt, synthetic construct
  misc_feature 1..20: note = source = /note="Description of Artificial Sequence: Synthetic oligonucleotide"
  source 1..20: mol_type = other RNA
ttacaataaagcaagttgta

SEQ ID NO: 7868 - RNA, 20 nt, synthetic construct
  misc_feature 1..20: note = source = /note="Description of Artificial Sequence: Synthetic oligonucleotide"
  source 1..20: mol_type = other RNA
agcaagttgtaaggactttt

SEQ ID NO: 7869 - RNA, 20 nt, synthetic construct
  misc_feature 1..20: note = source = /note="Description of Artificial Sequence: Synthetic oligonucleotide"
  source 1..20: mol_type = other RNA
aaaaaatgccaacaattatc

SEQ ID NO: 7870 - RNA, 20 nt, synthetic construct
  misc_feature 1..20: note = source = /note="Description of Artificial Sequence: Synthetic oligonucleotide"
  source 1..20: mol_type = other RNA
aaaaatgccaacaattatct

SEQ ID NO: 7871 - RNA, 20 nt, synthetic construct
  misc_feature 1..20: note = source = /note="Description of Artificial Sequence: Synthetic oligonucleotide"
  source 1..20: mol_type = other RNA
gtgagtgctaatctttttgc

SEQ ID NO: 7872 - RNA, 20 nt, synthetic construct
  misc_feature 1..20: note = source = /note="Description of Artificial Sequence: Synthetic oligonucleotide"
  source 1..20: mol_type = other RNA
agtgctaatctttttgctgg

SEQ ID NO: 7873 - RNA, 20 nt, synthetic construct
  misc_feature 1..20: note = source = /note="Description of Artificial Sequence: Synthetic oligonucleotide"
  source 1..20: mol_type = other RNA
gctaatctttttgctggtgg

SEQ ID NO: 7874 - RNA, 20 nt, synthetic construct
  misc_feature 1..20: note = source = /note="Description of Artificial Sequence: Synthetic oligonucleotide"
  source 1..20: mol_type = other RNA
ctaatctttttgctggtgga

SEQ ID NO: 7875 - RNA, 20 nt, synthetic construct
  misc_feature 1..20: note = source = /note="Description of Artificial Sequence: Synthetic oligonucleotide"
  source 1..20: mol_type = other RNA
tgcttcagtattgatcgctg

SEQ ID NO: 7876 - RNA, 20 nt, synthetic construct
  misc_feature 1..20: note = source = /note="Description of Artificial Sequence: Synthetic oligonucleotide"
  source 1..20: mol_type = other RNA
tgatcgctgtggactgatca

SEQ ID NO: 7877 - RNA, 20 nt, synthetic construct
  misc_feature 1..20: note = source = /note="Description of Artificial Sequence: Synthetic oligonucleotide"
  source 1..20: mol_type = other RNA
tcgctgtggactgatcatgg

SEQ ID NO: 7878 - RNA, 20 nt, synthetic construct
  misc_feature 1..20: note = source = /note="Description of Artificial Sequence: Synthetic oligonucleotide"
  source 1..20: mol_type = other RNA
atcatggtggtagttgctga

SEQ ID NO: 7879 - RNA, 20 nt, synthetic construct
  misc_feature 1..20: note = source = /note="Description of Artificial Sequence: Synthetic oligonucleotide"
  source 1..20: mol_type = other RNA
tggtagttgctgaaggttgc

SEQ ID NO: 7880 - RNA, 20 nt, synthetic construct
  misc_feature 1..20: note = source = /note="Description of Artificial Sequence: Synthetic oligonucleotide"
  source 1..20: mol_type = other RNA
ggtagttgctgaaggttgct

SEQ ID NO: 7881 - RNA, 20 nt, synthetic construct
  misc_feature 1..20: note = source = /note="Description of Artificial Sequence: Synthetic oligonucleotide"
  source 1..20: mol_type = other RNA
gttgctgaaggttgctggga

SEQ ID NO: 7882 - RNA, 20 nt, synthetic construct
  misc_feature 1..20: note = source = /note="Description of Artificial Sequence: Synthetic oligonucleotide"
  source 1..20: mol_type = other RNA
tgctgggatggctgtgtgtg

SEQ ID NO: 7883 - RNA, 20 nt, synthetic construct
  misc_feature 1..20: note = source = /note="Description of Artificial Sequence: Synthetic oligonucleotide"
  source 1..20: mol_type = other RNA
agcagaatttctttgaaaat

SEQ ID NO: 7884 - RNA, 20 nt, synthetic construct
  misc_feature 1..20: note = source = /note="Description of Artificial Sequence: Synthetic oligonucleotide"
  source 1..20: mol_type = other RNA
gcagtttacagcatcttcat

SEQ ID NO: 7885 - RNA, 20 nt, synthetic construct
  misc_feature 1..20: note = source = /note="Description of Artificial Sequence: Synthetic oligonucleotide"
  source 1..20: mol_type = other RNA
agtaactcagccccatcttc

SEQ ID NO: 7886 - RNA, 20 nt, synthetic construct
  misc_feature 1..20: note = source = /note="Description of Artificial Sequence: Synthetic oligonucleotide"
  source 1..20: mol_type = other RNA
tcaggctctacttctaattc

SEQ ID NO: 7887 - RNA, 20 nt, synthetic construct
  misc_feature 1..20: note = source = /note="Description of Artificial Sequence: Synthetic oligonucleotide"
  source 1..20: mol_type = other RNA
catctgcagtgacctctcca

SEQ ID NO: 7888 - RNA, 20 nt, synthetic construct
  misc_feature 1..20: note = source = /note="Description of Artificial Sequence: Synthetic oligonucleotide"
  source 1..20: mol_type = other RNA
actcctcaaagtaatccatg

SEQ ID NO: 7889 - RNA, 20 nt, synthetic construct
  misc_feature 1..20: note = source = /note="Description of Artificial Sequence: Synthetic oligonucleotide"
  source 1..20: mol_type = other RNA
ctcctcaaagtaatccatga

SEQ ID NO: 7890 - RNA, 20 nt, synthetic construct
  misc_feature 1..20: note = source = /note="Description of Artificial Sequence: Synthetic oligonucleotide"
  source 1..20: mol_type = other RNA
tcaaagtaatccatgagggt

SEQ ID NO: 7891 - RNA, 20 nt, synthetic construct
  misc_feature 1..20: note = source = /note="Description of Artificial Sequence: Synthetic oligonucleotide"
  source 1..20: mol_type = other RNA
tgttcttaataacttctaaa

SEQ ID NO: 7892 - RNA, 20 nt, synthetic construct
  misc_feature 1..20: note = source = /note="Description of Artificial Sequence: Synthetic oligonucleotide"
  source 1..20: mol_type = other RNA
aatggtgatacctttccaga

SEQ ID NO: 7893 - RNA, 20 nt, synthetic construct
  misc_feature 1..20: note = source = /note="Description of Artificial Sequence: Synthetic oligonucleotide"
  source 1..20: mol_type = other RNA
ggctttcaatgtactttgcc

SEQ ID NO: 7894 - RNA, 20 nt, synthetic construct
  misc_feature 1..20: note = source = /note="Description of Artificial Sequence: Synthetic oligonucleotide"
  source 1..20: mol_type = other RNA
gatccatcagaagactatct

SEQ ID NO: 7895 - RNA, 20 nt, synthetic construct
  misc_feature 1..20: note = source = /note="Description of Artificial Sequence: Synthetic oligonucleotide"
  source 1..20: mol_type = other RNA
aaaagtactccttaatccat

SEQ ID NO: 7896 - RNA, 20 nt, synthetic construct
  misc_feature 1..20: note = source = /note="Description of Artificial Sequence: Synthetic oligonucleotide"
  source 1..20: mol_type = other RNA
agaatcaatgttgtattaac

SEQ ID NO: 7897 - RNA, 20 nt, synthetic construct
  misc_feature 1..20: note = source = /note="Description of Artificial Sequence: Synthetic oligonucleotide"
  source 1..20: mol_type = other RNA
ttaatcttgtgcatctccat

SEQ ID NO: 7898 - RNA, 20 nt, synthetic construct
  misc_feature 1..20: note = source = /note="Description of Artificial Sequence: Synthetic oligonucleotide"
  source 1..20: mol_type = other RNA
tgcatctccatcggagctct

SEQ ID NO: 7899 - RNA, 20 nt, synthetic construct
  misc_feature 1..20: note = source = /note="Description of Artificial Sequence: Synthetic oligonucleotide"
  source 1..20: mol_type = other RNA
gcatctccatcggagctctt

SEQ ID NO: 7900 - RNA, 20 nt, synthetic construct
  misc_feature 1..20: note = source = /note="Description of Artificial Sequence: Synthetic oligonucleotide"
  source 1..20: mol_type = other RNA
atcggagctcttgggtgact

SEQ ID NO: 7901 - RNA, 20 nt, synthetic construct
  misc_feature 1..20: note = source = /note="Description of Artificial Sequence: Synthetic oligonucleotide"
  source 1..20: mol_type = other RNA
ttgagcagtaatattttgaa

SEQ ID NO: 7902 - RNA, 20 nt, synthetic construct
  misc_feature 1..20: note = source = /note="Description of Artificial Sequence: Synthetic oligonucleotide"
  source 1..20: mol_type = other RNA
agcagtaatattttgaaagg

SEQ ID NO: 7903 - RNA, 20 nt, synthetic construct
  misc_feature 1..20: note = source = /note="Description of Artificial Sequence: Synthetic oligonucleotide"
  source 1..20: mol_type = other RNA
aatattttgaaaggaggttt

SEQ ID NO: 7904 - RNA, 20 nt, synthetic construct
  misc_feature 1..20: note = source = /note="Description of Artificial Sequence: Synthetic oligonucleotide"
  source 1..20: mol_type = other RNA
ttagcagtaagtctcaacac

SEQ ID NO: 7905 - RNA, 20 nt, synthetic construct
  misc_feature 1..20: note = source = /note="Description of Artificial Sequence: Synthetic oligonucleotide"
  source 1..20: mol_type = other RNA
tagcagtaagtctcaacact

SEQ ID NO: 7906 - RNA, 20 nt, synthetic construct
  misc_feature 1..20: note = source = /note="Description of Artificial Sequence: Synthetic oligonucleotide"
  source 1..20: mol_type = other RNA
ttccattactctacacaagc

SEQ ID NO: 7907 - RNA, 20 nt, synthetic construct
  misc_feature 1..20: note = source = /note="Description of Artificial Sequence: Synthetic oligonucleotide"
  source 1..20: mol_type = other RNA
tccattactctacacaagca

SEQ ID NO: 7908 - RNA, 20 nt, synthetic construct
  misc_feature 1..20: note = source = /note="Description of Artificial Sequence: Synthetic oligonucleotide"
  source 1..20: mol_type = other RNA
tacacttagcataattctta

SEQ ID NO: 7909 - RNA, 20 nt, synthetic construct
  misc_feature 1..20: note = source = /note="Description of Artificial Sequence: Synthetic oligonucleotide"
  source 1..20: mol_type = other RNA
acacttagcataattcttaa

SEQ ID NO: 7910 - RNA, 20 nt, synthetic construct
  misc_feature 1..20: note = source = /note="Description of Artificial Sequence: Synthetic oligonucleotide"
  source 1..20: mol_type = other RNA
agcataattcttaagggcct

SEQ ID NO: 7911 - RNA, 20 nt, synthetic construct
  misc_feature 1..20: note = source = /note="Description of Artificial Sequence: Synthetic oligonucleotide"
  source 1..20: mol_type = other RNA
gggccttggaattttcagaa

SEQ ID NO: 7912 - RNA, 20 nt, synthetic construct
  misc_feature 1..20: note = source = /note="Description of Artificial Sequence: Synthetic oligonucleotide"
  source 1..20: mol_type = other RNA
ttcagaatggtaaatgagta

SEQ ID NO: 7913 - RNA, 20 nt, synthetic construct
  misc_feature 1..20: note = source = /note="Description of Artificial Sequence: Synthetic oligonucleotide"
  source 1..20: mol_type = other RNA
tcagaatggtaaatgagtat

SEQ ID NO: 7914 - RNA, 20 nt, synthetic construct
  misc_feature 1..20: note = source = /note="Description of Artificial Sequence: Synthetic oligonucleotide"
  source 1..20: mol_type = other RNA
tcagcctgtcctttgaagca

SEQ ID NO: 7915 - RNA, 20 nt, synthetic construct
  misc_feature 1..20: note = source = /note="Description of Artificial Sequence: Synthetic oligonucleotide"
  source 1..20: mol_type = other RNA
ctatctatgaaagtcttaga

SEQ ID NO: 7916 - RNA, 20 nt, synthetic construct
  misc_feature 1..20: note = source = /note="Description of Artificial Sequence: Synthetic oligonucleotide"
  source 1..20: mol_type = other RNA
tggcaccttgtttcaatagt

SEQ ID NO: 7917 - RNA, 20 nt, synthetic construct
  misc_feature 1..20: note = source = /note="Description of Artificial Sequence: Synthetic oligonucleotide"
  source 1..20: mol_type = other RNA
cattctcttcatagaactga

SEQ ID NO: 7918 - RNA, 20 nt, synthetic construct
  misc_feature 1..20: note = source = /note="Description of Artificial Sequence: Synthetic oligonucleotide"
  source 1..20: mol_type = other RNA
attctcttcatagaactgaa

SEQ ID NO: 7919 - RNA, 20 nt, synthetic construct
  misc_feature 1..20: note = source = /note="Description of Artificial Sequence: Synthetic oligonucleotide"
  source 1..20: mol_type = other RNA
catagaactgaagggagtca

SEQ ID NO: 7920 - RNA, 20 nt, synthetic construct
  misc_feature 1..20: note = source = /note="Description of Artificial Sequence: Synthetic oligonucleotide"
  source 1..20: mol_type = other RNA
agggagtcaaggccttgctc

SEQ ID NO: 7921 - RNA, 20 nt, synthetic construct
  misc_feature 1..20: note = source = /note="Description of Artificial Sequence: Synthetic oligonucleotide"
  source 1..20: mol_type = other RNA
ccttgctctggattaagctt

SEQ ID NO: 7922 - RNA, 20 nt, synthetic construct
  misc_feature 1..20: note = source = /note="Description of Artificial Sequence: Synthetic oligonucleotide"
  source 1..20: mol_type = other RNA
ctggattaagctttggctta

SEQ ID NO: 7923 - RNA, 20 nt, synthetic construct
  misc_feature 1..20: note = source = /note="Description of Artificial Sequence: Synthetic oligonucleotide"
  source 1..20: mol_type = other RNA
ctttggcttaaggaatgttg

SEQ ID NO: 7924 - RNA, 20 nt, synthetic construct
  misc_feature 1..20: note = source = /note="Description of Artificial Sequence: Synthetic oligonucleotide"
  source 1..20: mol_type = other RNA
cgctctccatatcagcaata

SEQ ID NO: 7925 - RNA, 20 nt, synthetic construct
  misc_feature 1..20: note = source = /note="Description of Artificial Sequence: Synthetic oligonucleotide"
  source 1..20: mol_type = other RNA
cttacctttcatgtgttcac

SEQ ID NO: 7926 - RNA, 20 nt, synthetic construct
  misc_feature 1..20: note = source = /note="Description of Artificial Sequence: Synthetic oligonucleotide"
  source 1..20: mol_type = other RNA
tttcctttacattcacaact

SEQ ID NO: 7927 - RNA, 20 nt, synthetic construct
  misc_feature 1..20: note = source = /note="Description of Artificial Sequence: Synthetic oligonucleotide"
  source 1..20: mol_type = other RNA
acattcacaacttggctaac

SEQ ID NO: 7928 - RNA, 20 nt, synthetic construct
  misc_feature 1..20: note = source = /note="Description of Artificial Sequence: Synthetic oligonucleotide"
  source 1..20: mol_type = other RNA
acttggctaactggcatgca

SEQ ID NO: 7929 - RNA, 20 nt, synthetic construct
  misc_feature 1..20: note = source = /note="Description of Artificial Sequence: Synthetic oligonucleotide"
  source 1..20: mol_type = other RNA
gcctagctttcagcctgtct

SEQ ID NO: 7930 - RNA, 20 nt, synthetic construct
  misc_feature 1..20: note = source = /note="Description of Artificial Sequence: Synthetic oligonucleotide"
  source 1..20: mol_type = other RNA
atctagcttttgatttaaag

SEQ ID NO: 7931 - RNA, 20 nt, synthetic construct
  misc_feature 1..20: note = source = /note="Description of Artificial Sequence: Synthetic oligonucleotide"
  source 1..20: mol_type = other RNA
agcttttgatttaaagtggc

SEQ ID NO: 7932 - RNA, 20 nt, synthetic construct
  misc_feature 1..20: note = source = /note="Description of Artificial Sequence: Synthetic oligonucleotide"
  source 1..20: mol_type = other RNA
cctttcacttgaacacttag

SEQ ID NO: 7933 - RNA, 20 nt, synthetic construct
  misc_feature 1..20: note = source = /note="Description of Artificial Sequence: Synthetic oligonucleotide"
  source 1..20: mol_type = other RNA
gaacacttagaggccactgt

SEQ ID NO: 7934 - RNA, 20 nt, synthetic construct
  misc_feature 1..20: note = source = /note="Description of Artificial Sequence: Synthetic oligonucleotide"
  source 1..20: mol_type = other RNA
aacacttagaggccactgta

SEQ ID NO: 7935 - RNA, 20 nt, synthetic construct
  misc_feature 1..20: note = source = /note="Description of Artificial Sequence: Synthetic oligonucleotide"
  source 1..20: mol_type = other RNA
gccactgtagggttattaat

SEQ ID NO: 7936 - RNA, 20 nt, synthetic construct
  misc_feature 1..20: note = source = /note="Description of Artificial Sequence: Synthetic oligonucleotide"
  source 1..20: mol_type = other RNA
tttcaatattgttgtgtttt

SEQ ID NO: 7937 - RNA, 20 nt, synthetic construct
  misc_feature 1..20: note = source = /note="Description of Artificial Sequence: Synthetic oligonucleotide"
  source 1..20: mol_type = other RNA
ttcaatattgttgtgtttta

SEQ ID NO: 7938 - RNA, 20 nt, synthetic construct
  misc_feature 1..20: note = source = /note="Description of Artificial Sequence: Synthetic oligonucleotide"
  source 1..20: mol_type = other RNA
ttgtgttttagggaatagag

SEQ ID NO: 7939 - RNA, 20 nt, synthetic construct
  misc_feature 1..20: note = source = /note="Description of Artificial Sequence: Synthetic oligonucleotide"
  source 1..20: mol_type = other RNA
tttagggaatagagaggccc

SEQ ID NO: 7940 - RNA, 20 nt, synthetic construct
  misc_feature 1..20: note = source = /note="Description of Artificial Sequence: Synthetic oligonucleotide"
  source 1..20: mol_type = other RNA
ttagggaatagagaggccca

SEQ ID NO: 7941 - RNA, 20 nt, synthetic construct
  misc_feature 1..20: note = source = /note="Description of Artificial Sequence: Synthetic oligonucleotide"
  source 1..20: mol_type = other RNA
gaatagagaggcccagggag

SEQ ID NO: 7942 - RNA, 20 nt, synthetic construct
  misc_feature 1..20: note = source = /note="Description of Artificial Sequence: Synthetic oligonucleotide"
  source 1..20: mol_type = other RNA
aatagagaggcccagggaga

SEQ ID NO: 7943 - RNA, 20 nt, synthetic construct
  misc_feature 1..20: note = source = /note="Description of Artificial Sequence: Synthetic oligonucleotide"
  source 1..20: mol_type = other RNA
ggagagggagagagcccaaa

SEQ ID NO: 7944 - RNA, 20 nt, synthetic construct
  misc_feature 1..20: note = source = /note="Description of Artificial Sequence: Synthetic oligonucleotide"
  source 1..20: mol_type = other RNA
agggagagagcccaaacggc

SEQ ID NO: 7945 - RNA, 20 nt, synthetic construct
  misc_feature 1..20: note = source = /note="Description of Artificial Sequence: Synthetic oligonucleotide"
  source 1..20: mol_type = other RNA
aaacggctggttgatagagc

SEQ ID NO: 7946 - RNA, 20 nt, synthetic construct
  misc_feature 1..20: note = source = /note="Description of Artificial Sequence: Synthetic oligonucleotide"
  source 1..20: mol_type = other RNA
ttgcaccatttaccagatta

SEQ ID NO: 7947 - RNA, 20 nt, synthetic construct
  misc_feature 1..20: note = source = /note="Description of Artificial Sequence: Synthetic oligonucleotide"
  source 1..20: mol_type = other RNA
tgcaccatttaccagattat

SEQ ID NO: 7948 - RNA, 20 nt, synthetic construct
  misc_feature 1..20: note = source = /note="Description of Artificial Sequence: Synthetic oligonucleotide"
  source 1..20: mol_type = other RNA
catttaccagattatgggta

SEQ ID NO: 7949 - RNA, 20 nt, synthetic construct
  misc_feature 1..20: note = source = /note="Description of Artificial Sequence: Synthetic oligonucleotide"
  source 1..20: mol_type = other RNA
cagattatgggtacggtttg

SEQ ID NO: 7950 - RNA, 20 nt, synthetic construct
  misc_feature 1..20: note = source = /note="Description of Artificial Sequence: Synthetic oligonucleotide"
  source 1..20: mol_type = other RNA
tgatagacatacttaacacg

SEQ ID NO: 7951 - RNA, 20 nt, synthetic construct
  misc_feature 1..20: note = source = /note="Description of Artificial Sequence: Synthetic oligonucleotide"
  source 1..20: mol_type = other RNA
gatagacatacttaacacgt

SEQ ID NO: 7952 - RNA, 20 nt, synthetic construct
  misc_feature 1..20: note = source = /note="Description of Artificial Sequence: Synthetic oligonucleotide"
  source 1..20: mol_type = other RNA
gaacaaagcacaataaaacg

SEQ ID NO: 7953 - RNA, 20 nt, synthetic construct
  misc_feature 1..20: note = source = /note="Description of Artificial Sequence: Synthetic oligonucleotide"
  source 1..20: mol_type = other RNA
aaagctttttgttaaaattc

SEQ ID NO: 7954 - RNA, 20 nt, synthetic construct
  misc_feature 1..20: note = source = /note="Description of Artificial Sequence: Synthetic oligonucleotide"
  source 1..20: mol_type = other RNA
taaaattcaggatatgtaat

SEQ ID NO: 7955 - RNA, 20 nt, synthetic construct
  misc_feature 1..20: note = source = /note="Description of Artificial Sequence: Synthetic oligonucleotide"
  source 1..20: mol_type = other RNA
aggatatgtaataggtctgt

SEQ ID NO: 7956 - RNA, 20 nt, synthetic construct
  misc_feature 1..20: note = source = /note="Description of Artificial Sequence: Synthetic oligonucleotide"
  source 1..20: mol_type = other RNA
tagtgaaatatttttgctga

SEQ ID NO: 7957 - RNA, 20 nt, synthetic construct
  misc_feature 1..20: note = source = /note="Description of Artificial Sequence: Synthetic oligonucleotide"
  source 1..20: mol_type = other RNA
gatggatgtagatatatacg

SEQ ID NO: 7958 - RNA, 20 nt, synthetic construct
  misc_feature 1..20: note = source = /note="Description of Artificial Sequence: Synthetic oligonucleotide"
  source 1..20: mol_type = other RNA
agacaaatgttaaattagtg

SEQ ID NO: 7959 - RNA, 20 nt, synthetic construct
  misc_feature 1..20: note = source = /note="Description of Artificial Sequence: Synthetic oligonucleotide"
  source 1..20: mol_type = other RNA
gataccccacactgtgtaga

SEQ ID NO: 7960 - RNA, 20 nt, synthetic construct
  misc_feature 1..20: note = source = /note="Description of Artificial Sequence: Synthetic oligonucleotide"
  source 1..20: mol_type = other RNA
ccccacactgtgtagaagga

SEQ ID NO: 7961 - RNA, 20 nt, synthetic construct
  misc_feature 1..20: note = source = /note="Description of Artificial Sequence: Synthetic oligonucleotide"
  source 1..20: mol_type = other RNA
cacactgtgtagaaggatgg

SEQ ID NO: 7962 - RNA, 20 nt, synthetic construct
  misc_feature 1..20: note = source = /note="Description of Artificial Sequence: Synthetic oligonucleotide"
  source 1..20: mol_type = other RNA
acactgtgtagaaggatgga

SEQ ID NO: 7963 - RNA, 20 nt, synthetic construct
  misc_feature 1..20: note = source = /note="Description of Artificial Sequence: Synthetic oligonucleotide"
  source 1..20: mol_type = other RNA
ctgtgtagaaggatggaggg

SEQ ID NO: 7964 - RNA, 20 nt, synthetic construct
  misc_feature 1..20: note = source = /note="Description of Artificial Sequence: Synthetic oligonucleotide"
  source 1..20: mol_type = other RNA
ctactgtccctctttgcgtg

SEQ ID NO: 7965 - RNA, 20 nt, synthetic construct
  misc_feature 1..20: note = source = /note="Description of Artificial Sequence: Synthetic oligonucleotide"
  source 1..20: mol_type = other RNA
tggttattaagttgcctcac

SEQ ID NO: 7966 - RNA, 20 nt, synthetic construct
  misc_feature 1..20: note = source = /note="Description of Artificial Sequence: Synthetic oligonucleotide"
  source 1..20: mol_type = other RNA
ggttattaagttgcctcact

SEQ ID NO: 7967 - RNA, 20 nt, synthetic construct
  misc_feature 1..20: note = source = /note="Description of Artificial Sequence: Synthetic oligonucleotide"
  source 1..20: mol_type = other RNA
cacatctcatagataatatt

SEQ ID NO: 7968 - RNA, 20 nt, synthetic construct
  misc_feature 1..20: note = source = /note="Description of Artificial Sequence: Synthetic oligonucleotide"
  source 1..20: mol_type = other RNA
tcccacttttccatctttgt

SEQ ID NO: 7969 - RNA, 20 nt, synthetic construct
  misc_feature 1..20: note = source = /note="Description of Artificial Sequence: Synthetic oligonucleotide"
  source 1..20: mol_type = other RNA
ttctttttgcctgactctcc

SEQ ID NO: 7970 - RNA, 20 nt, synthetic construct
  misc_feature 1..20: note = source = /note="Description of Artificial Sequence: Synthetic oligonucleotide"
  source 1..20: mol_type = other RNA
ttctaaagtacatactaata

SEQ ID NO: 7971 - RNA, 20 nt, synthetic construct
  misc_feature 1..20: note = source = /note="Description of Artificial Sequence: Synthetic oligonucleotide"
  source 1..20: mol_type = other RNA
tctaaagtacatactaatat

SEQ ID NO: 7972 - RNA, 20 nt, synthetic construct
  misc_feature 1..20: note = source = /note="Description of Artificial Sequence: Synthetic oligonucleotide"
  source 1..20: mol_type = other RNA
agtacatactaatatgggtc

SEQ ID NO: 7973 - RNA, 20 nt, synthetic construct
  misc_feature 1..20: note = source = /note="Description of Artificial Sequence: Synthetic oligonucleotide"
  source 1..20: mol_type = other RNA
aaacagcaattaaatgttat

SEQ ID NO: 7974 - RNA, 20 nt, synthetic construct
  misc_feature 1..20: note = source = /note="Description of Artificial Sequence: Synthetic oligonucleotide"
  source 1..20: mol_type = other RNA
aacagcaattaaatgttata

SEQ ID NO: 7975 - RNA, 20 nt, synthetic construct
  misc_feature 1..20: note = source = /note="Description of Artificial Sequence: Synthetic oligonucleotide"
  source 1..20: mol_type = other RNA
attaaatgttatagggaagt

SEQ ID NO: 7976 - RNA, 20 nt, synthetic construct
  misc_feature 1..20: note = source = /note="Description of Artificial Sequence: Synthetic oligonucleotide"
  source 1..20: mol_type = other RNA
atagggaagtaggaagaaaa

SEQ ID NO: 7977 - RNA, 20 nt, synthetic construct
  misc_feature 1..20: note = source = /note="Description of Artificial Sequence: Synthetic oligonucleotide"
  source 1..20: mol_type = other RNA
tagggaagtaggaagaaaaa

SEQ ID NO: 7978 - RNA, 20 nt, synthetic construct
  misc_feature 1..20: note = source = /note="Description of Artificial Sequence: Synthetic oligonucleotide"
  source 1..20: mol_type = other RNA
agggaagtaggaagaaaaag

SEQ ID NO: 7979 - RNA, 20 nt, synthetic construct
  misc_feature 1..20: note = source = /note="Description of Artificial Sequence: Synthetic oligonucleotide"
  source 1..20: mol_type = other RNA
caataaaccaagcaatattc

SEQ ID NO: 7980 - RNA, 20 nt, synthetic construct
  misc_feature 1..20: note = source = /note="Description of Artificial Sequence: Synthetic oligonucleotide"
  source 1..20: mol_type = other RNA
aataaaccaagcaatattct

SEQ ID NO: 7981 - RNA, 20 nt, synthetic construct
  misc_feature 1..20: note = source = /note="Description of Artificial Sequence: Synthetic oligonucleotide"
  source 1..20: mol_type = other RNA
ataaaccaagcaatattctg

SEQ ID NO: 7982 - RNA, 20 nt, synthetic construct
  misc_feature 1..20: note = source = /note="Description of Artificial Sequence: Synthetic oligonucleotide"
  source 1..20: mol_type = other RNA
taaaccaagcaatattctgg

SEQ ID NO: 7983 - RNA, 20 nt, synthetic construct
  misc_feature 1..20: note = source = /note="Description of Artificial Sequence: Synthetic oligonucleotide"
  source 1..20: mol_type = other RNA
accaagcaatattctggggg

SEQ ID NO: 7984 - RNA, 20 nt, synthetic construct
  misc_feature 1..20: note = source = /note="Description of Artificial Sequence: Synthetic oligonucleotide"
  source 1..20: mol_type = other RNA
ccaagcaatattctgggggt

SEQ ID NO: 7985 - RNA, 20 nt, synthetic construct
  misc_feature 1..20: note = source = /note="Description of Artificial Sequence: Synthetic oligonucleotide"
  source 1..20: mol_type = other RNA
ttctgggggtgggatagagc

SEQ ID NO: 7986 - RNA, 20 nt, synthetic construct
  misc_feature 1..20: note = source = /note="Description of Artificial Sequence: Synthetic oligonucleotide"
  source 1..20: mol_type = other RNA
tcttttaaaatccaagtaat

SEQ ID NO: 7987 - RNA, 20 nt, synthetic construct
  misc_feature 1..20: note = source = /note="Description of Artificial Sequence: Synthetic oligonucleotide"
  source 1..20: mol_type = other RNA
ttaaaatccaagtaataggt

SEQ ID NO: 7988 - RNA, 20 nt, synthetic construct
  misc_feature 1..20: note = source = /note="Description of Artificial Sequence: Synthetic oligonucleotide"
  source 1..20: mol_type = other RNA
ttttttccagctcaaaaaat

SEQ ID NO: 7989 - RNA, 20 nt, synthetic construct
  misc_feature 1..20: note = source = /note="Description of Artificial Sequence: Synthetic oligonucleotide"
  source 1..20: mol_type = other RNA
tttgtttagtttcatttatt

SEQ ID NO: 7990 - RNA, 20 nt, synthetic construct
  misc_feature 1..20: note = source = /note="Description of Artificial Sequence: Synthetic oligonucleotide"
  source 1..20: mol_type = other RNA
tgtacatatacttaattatg

SEQ ID NO: 7991 - RNA, 20 nt, synthetic construct
  misc_feature 1..20: note = source = /note="Description of Artificial Sequence: Synthetic oligonucleotide"
  source 1..20: mol_type = other RNA
tagagcccttaatgtgtagt

SEQ ID NO: 7992 - RNA, 20 nt, synthetic construct
  misc_feature 1..20: note = source = /note="Description of Artificial Sequence: Synthetic oligonucleotide"
  source 1..20: mol_type = other RNA
agagcccttaatgtgtagtt

SEQ ID NO: 7993 - RNA, 20 nt, synthetic construct
  misc_feature 1..20: note = source = /note="Description of Artificial Sequence: Synthetic oligonucleotide"
  source 1..20: mol_type = other RNA
gagcccttaatgtgtagttg

SEQ ID NO: 7994 - RNA, 20 nt, synthetic construct
  misc_feature 1..20: note = source = /note="Description of Artificial Sequence: Synthetic oligonucleotide"
  source 1..20: mol_type = other RNA
agcccttaatgtgtagttgg

SEQ ID NO: 7995 - RNA, 20 nt, synthetic construct
  misc_feature 1..20: note = source = /note="Description of Artificial Sequence: Synthetic oligonucleotide"
  source 1..20: mol_type = other RNA
tagttgggggttaagctttg

SEQ ID NO: 7996 - RNA, 20 nt, synthetic construct
  misc_feature 1..20: note = source = /note="Description of Artificial Sequence: Synthetic oligonucleotide"
  source 1..20: mol_type = other RNA
ctttatatttagtataattg

SEQ ID NO: 7997 - RNA, 20 nt, synthetic construct
  misc_feature 1..20: note = source = /note="Description of Artificial Sequence: Synthetic oligonucleotide"
  source 1..20: mol_type = other RNA
catgtgtctcagtacatttc

SEQ ID NO: 7998 - RNA, 20 nt, synthetic construct
  misc_feature 1..20: note = source = /note="Description of Artificial Sequence: Synthetic oligonucleotide"
  source 1..20: mol_type = other RNA
gaagataaatttgctaattc

SEQ ID NO: 7999 - RNA, 20 nt, synthetic construct
  misc_feature 1..20: note = source = /note="Description of Artificial Sequence: Synthetic oligonucleotide"
  source 1..20: mol_type = other RNA
actcaagatttaaaaaaaga

SEQ ID NO: 8000 - RNA, 20 nt, synthetic construct
  misc_feature 1..20: note = source = /note="Description of Artificial Sequence: Synthetic oligonucleotide"
  source 1..20: mol_type = other RNA
ctttcacaagacacaagcat

SEQ ID NO: 8001 - RNA, 20 nt, synthetic construct
  misc_feature 1..20: note = source = /note="Description of Artificial Sequence: Synthetic oligonucleotide"
  source 1..20: mol_type = other RNA
gcacgattatttaattcttt

SEQ ID NO: 8002 - RNA, 20 nt, synthetic construct
  misc_feature 1..20: note = source = /note="Description of Artificial Sequence: Synthetic oligonucleotide"
  source 1..20: mol_type = other RNA
ttttacaggatctgaagaga

SEQ ID NO: 8003 - RNA, 20 nt, synthetic construct
  misc_feature 1..20: note = source = /note="Description of Artificial Sequence: Synthetic oligonucleotide"
  source 1..20: mol_type = other RNA
attttacaggatctgaagag

SEQ ID NO: 8004 - RNA, 20 nt, synthetic construct
  misc_feature 1..20: note = source = /note="Description of Artificial Sequence: Synthetic oligonucleotide"
  source 1..20: mol_type = other RNA
cagatacattcaaattttac

SEQ ID NO: 8005 - RNA, 20 nt, synthetic construct
  misc_feature 1..20: note = source = /note="Description of Artificial Sequence: Synthetic oligonucleotide"
  source 1..20: mol_type = other RNA
taatatacaaagagctaaat

SEQ ID NO: 8006 - RNA, 20 nt, synthetic construct
  misc_feature 1..20: note = source = /note="Description of Artificial Sequence: Synthetic oligonucleotide"
  source 1..20: mol_type = other RNA
tgctgcctagctgtctctcc

SEQ ID NO: 8007 - RNA, 20 nt, synthetic construct
  misc_feature 1..20: note = source = /note="Description of Artificial Sequence: Synthetic oligonucleotide"
  source 1..20: mol_type = other RNA
ttcgtacattagactgccta

SEQ ID NO: 8008 - RNA, 20 nt, synthetic construct
  misc_feature 1..20: note = source = /note="Description of Artificial Sequence: Synthetic oligonucleotide"
  source 1..20: mol_type = other RNA
aatggagaaaaggaaacttt

SEQ ID NO: 8009 - RNA, 20 nt, synthetic construct
  misc_feature 1..20: note = source = /note="Description of Artificial Sequence: Synthetic oligonucleotide"
  source 1..20: mol_type = other RNA
caaatgtataaatggagaaa

SEQ ID NO: 8010 - RNA, 20 nt, synthetic construct
  misc_feature 1..20: note = source = /note="Description of Artificial Sequence: Synthetic oligonucleotide"
  source 1..20: mol_type = other RNA
caacattccaaatgtataaa

SEQ ID NO: 8011 - RNA, 20 nt, synthetic construct
  misc_feature 1..20: note = source = /note="Description of Artificial Sequence: Synthetic oligonucleotide"
  source 1..20: mol_type = other RNA
agatgaaattttagagaaaa

SEQ ID NO: 8012 - RNA, 20 nt, synthetic construct
  misc_feature 1..20: note = source = /note="Description of Artificial Sequence: Synthetic oligonucleotide"
  source 1..20: mol_type = other RNA
aagatgaaattttagagaaa

SEQ ID NO: 8013 - RNA, 20 nt, synthetic construct
  misc_feature 1..20: note = source = /note="Description of Artificial Sequence: Synthetic oligonucleotide"
  source 1..20: mol_type = other RNA
ggtttgggtgttatagagac

SEQ ID NO: 8014 - RNA, 20 nt, synthetic construct
  misc_feature 1..20: note = source = /note="Description of Artificial Sequence: Synthetic oligonucleotide"
  source 1..20: mol_type = other RNA
tataagtaaaataacaccat

SEQ ID NO: 8015 - RNA, 20 nt, synthetic construct
  misc_feature 1..20: note = source = /note="Description of Artificial Sequence: Synthetic oligonucleotide"
  source 1..20: mol_type = other RNA
aacattataagtaaaataac

SEQ ID NO: 8016 - RNA, 20 nt, synthetic construct
  misc_feature 1..20: note = source = /note="Description of Artificial Sequence: Synthetic oligonucleotide"
  source 1..20: mol_type = other RNA
gatttccgggtctattaaca

SEQ ID NO: 8017 - RNA, 20 nt, synthetic construct
  misc_feature 1..20: note = source = /note="Description of Artificial Sequence: Synthetic oligonucleotide"
  source 1..20: mol_type = other RNA
ttttctaatcgtgagtgatt

SEQ ID NO: 8018 - RNA, 20 nt, synthetic construct
  misc_feature 1..20: note = source = /note="Description of Artificial Sequence: Synthetic oligonucleotide"
  source 1..20: mol_type = other RNA
tgtctctttagaaaacactt

SEQ ID NO: 8019 - RNA, 20 nt, synthetic construct
  misc_feature 1..20: note = source = /note="Description of Artificial Sequence: Synthetic oligonucleotide"
  source 1..20: mol_type = other RNA
aaagtttctttaagacgaca

SEQ ID NO: 8020 - RNA, 20 nt, synthetic construct
  misc_feature 1..20: note = source = /note="Description of Artificial Sequence: Synthetic oligonucleotide"
  source 1..20: mol_type = other RNA
aaaagtttctttaagacgac

SEQ ID NO: 8021 - RNA, 20 nt, synthetic construct
  misc_feature 1..20: note = source = /note="Description of Artificial Sequence: Synthetic oligonucleotide"
  source 1..20: mol_type = other RNA
ttcgtcgtcgtgtcaaactc

SEQ ID NO: 8022 - RNA, 20 nt, synthetic construct
  misc_feature 1..20: note = source = /note="Description of Artificial Sequence: Synthetic oligonucleotide"
  source 1..20: mol_type = other RNA
ttgacgactttactgttgtt

SEQ ID NO: 8023 - RNA, 20 nt, synthetic construct
  misc_feature 1..20: note = source = /note="Description of Artificial Sequence: Synthetic oligonucleotide"
  source 1..20: mol_type = other RNA
acttgtttcttacaaactct

SEQ ID NO: 8024 - RNA, 20 nt, synthetic construct
  misc_feature 1..20: note = source = /note="Description of Artificial Sequence: Synthetic oligonucleotide"
  source 1..20: mol_type = other RNA
actattcttcaacgaagaat

SEQ ID NO: 8025 - RNA, 20 nt, synthetic construct
  misc_feature 1..20: note = source = /note="Description of Artificial Sequence: Synthetic oligonucleotide"
  source 1..20: mol_type = other RNA
tcttcatctcggacttctac

SEQ ID NO: 8026 - RNA, 20 nt, synthetic construct
  misc_feature 1..20: note = source = /note="Description of Artificial Sequence: Synthetic oligonucleotide"
  source 1..20: mol_type = other RNA
atcttcatctcggacttcta

SEQ ID NO: 8027 - RNA, 20 nt, synthetic construct
  misc_feature 1..20: note = source = /note="Description of Artificial Sequence: Synthetic oligonucleotide"
  source 1..20: mol_type = other RNA
aatcttcatctcggacttct

SEQ ID NO: 8028 - RNA, 20 nt, synthetic construct
  misc_feature 1..20: note = source = /note="Description of Artificial Sequence: Synthetic oligonucleotide"
  source 1..20: mol_type = other RNA
cctctccagtgacgtctact

SEQ ID NO: 8029 - RNA, 20 nt, synthetic construct
  misc_feature 1..20: note = source = /note="Description of Artificial Sequence: Synthetic oligonucleotide"
  source 1..20: mol_type = other RNA
acctctccagtgacgtctac

SEQ ID NO: 8030 - RNA, 20 nt, synthetic construct
  misc_feature 1..20: note = source = /note="Description of Artificial Sequence: Synthetic oligonucleotide"
  source 1..20: mol_type = other RNA
tcaagttctgaaggcacctc

SEQ ID NO: 8031 - RNA, 20 nt, synthetic construct
  misc_feature 1..20: note = source = /note="Description of Artificial Sequence: Synthetic oligonucleotide"
  source 1..20: mol_type = other RNA
actcctcaagttctgaaggc

SEQ ID NO: 8032 - RNA, 20 nt, synthetic construct
  misc_feature 1..20: note = source = /note="Description of Artificial Sequence: Synthetic oligonucleotide"
  source 1..20: mol_type = other RNA
ttgggagtacctaatgaaac

SEQ ID NO: 8033 - RNA, 20 nt, synthetic construct
  misc_feature 1..20: note = source = /note="Description of Artificial Sequence: Synthetic oligonucleotide"
  source 1..20: mol_type = other RNA
cttcaactaaggttgggagt

SEQ ID NO: 8034 - RNA, 20 nt, synthetic construct
  misc_feature 1..20: note = source = /note="Description of Artificial Sequence: Synthetic oligonucleotide"
  source 1..20: mol_type = other RNA
cagttatatagttgtaattg

SEQ ID NO: 8035 - RNA, 20 nt, synthetic construct
  misc_feature 1..20: note = source = /note="Description of Artificial Sequence: Synthetic oligonucleotide"
  source 1..20: mol_type = other RNA
gtaagtattaagtaccctcc

SEQ ID NO: 8036 - RNA, 20 nt, synthetic construct
  misc_feature 1..20: note = source = /note="Description of Artificial Sequence: Synthetic oligonucleotide"
  source 1..20: mol_type = other RNA
tgtaagtattaagtaccctc

SEQ ID NO: 8037 - RNA, 20 nt, synthetic construct
  misc_feature 1..20: note = source = /note="Description of Artificial Sequence: Synthetic oligonucleotide"
  source 1..20: mol_type = other RNA
ttgtaagtattaagtaccct

SEQ ID NO: 8038 - RNA, 20 nt, synthetic construct
  misc_feature 1..20: note = source = /note="Description of Artificial Sequence: Synthetic oligonucleotide"
  source 1..20: mol_type = other RNA
cttgtaagtattaagtaccc

SEQ ID NO: 8039 - RNA, 20 nt, synthetic construct
  misc_feature 1..20: note = source = /note="Description of Artificial Sequence: Synthetic oligonucleotide"
  source 1..20: mol_type = other RNA
attcttgtaagtattaagta

SEQ ID NO: 8040 - RNA, 20 nt, synthetic construct
  misc_feature 1..20: note = source = /note="Description of Artificial Sequence: Synthetic oligonucleotide"
  source 1..20: mol_type = other RNA
aattcttgtaagtattaagt

SEQ ID NO: 8041 - RNA, 20 nt, synthetic construct
  misc_feature 1..20: note = source = /note="Description of Artificial Sequence: Synthetic oligonucleotide"
  source 1..20: mol_type = other RNA
tgtaactttcggaagacctt

SEQ ID NO: 8042 - RNA, 20 nt, synthetic construct
  misc_feature 1..20: note = source = /note="Description of Artificial Sequence: Synthetic oligonucleotide"
  source 1..20: mol_type = other RNA
tttcatgtaactttcggaag

SEQ ID NO: 8043 - RNA, 20 nt, synthetic construct
  misc_feature 1..20: note = source = /note="Description of Artificial Sequence: Synthetic oligonucleotide"
  source 1..20: mol_type = other RNA
ctatcagaagactacctagg

SEQ ID NO: 8044 - RNA, 20 nt, synthetic construct
  misc_feature 1..20: note = source = /note="Description of Artificial Sequence: Synthetic oligonucleotide"
  source 1..20: mol_type = other RNA
tctatcagaagactacctag

SEQ ID NO: 8045 - RNA, 20 nt, synthetic construct
  misc_feature 1..20: note = source = /note="Description of Artificial Sequence: Synthetic oligonucleotide"
  source 1..20: mol_type = other RNA
gacggttctatcagaagact

SEQ ID NO: 8046 - RNA, 20 nt, synthetic construct
  misc_feature 1..20: note = source = /note="Description of Artificial Sequence: Synthetic oligonucleotide"
  source 1..20: mol_type = other RNA
taagacgtcggatacctaat

SEQ ID NO: 8047 - RNA, 20 nt, synthetic construct
  misc_feature 1..20: note = source = /note="Description of Artificial Sequence: Synthetic oligonucleotide"
  source 1..20: mol_type = other RNA
ttgtaactaagacgtcggat

SEQ ID NO: 8048 - RNA, 20 nt, synthetic construct
  misc_feature 1..20: note = source = /note="Description of Artificial Sequence: Synthetic oligonucleotide"
  source 1..20: mol_type = other RNA
atcagtgggttctcgaggct

SEQ ID NO: 8049 - RNA, 20 nt, synthetic construct
  misc_feature 1..20: note = source = /note="Description of Artificial Sequence: Synthetic oligonucleotide"
  source 1..20: mol_type = other RNA
aaagttttataatgacgagt

SEQ ID NO: 8050 - RNA, 20 nt, synthetic construct
  misc_feature 1..20: note = source = /note="Description of Artificial Sequence: Synthetic oligonucleotide"
  source 1..20: mol_type = other RNA
tcattaccttgttgtttcag

SEQ ID NO: 8051 - RNA, 20 nt, synthetic construct
  misc_feature 1..20: note = source = /note="Description of Artificial Sequence: Synthetic oligonucleotide"
  source 1..20: mol_type = other RNA
tgggacgaacacatctcatt

SEQ ID NO: 8052 - RNA, 20 nt, synthetic construct
  misc_feature 1..20: note = source = /note="Description of Artificial Sequence: Synthetic oligonucleotide"
  source 1..20: mol_type = other RNA
aatggtaagacttttaaggt

SEQ ID NO: 8053 - RNA, 20 nt, synthetic construct
  misc_feature 1..20: note = source = /note="Description of Artificial Sequence: Synthetic oligonucleotide"
  source 1..20: mol_type = other RNA
gtccgactgagagaacaatg

SEQ ID NO: 8054 - RNA, 20 nt, synthetic construct
  misc_feature 1..20: note = source = /note="Description of Artificial Sequence: Synthetic oligonucleotide"
  source 1..20: mol_type = other RNA
ttacggaacgaagtttcctg

SEQ ID NO: 8055 - RNA, 20 nt, synthetic construct
  misc_feature 1..20: note = source = /note="Description of Artificial Sequence: Synthetic oligonucleotide"
  source 1..20: mol_type = other RNA
ttcagttacggaacgaagtt

SEQ ID NO: 8056 - RNA, 20 nt, synthetic construct
  misc_feature 1..20: note = source = /note="Description of Artificial Sequence: Synthetic oligonucleotide"
  source 1..20: mol_type = other RNA
ttgtcggatgataactttgt

SEQ ID NO: 8057 - RNA, 20 nt, synthetic construct
  misc_feature 1..20: note = source = /note="Description of Artificial Sequence: Synthetic oligonucleotide"
  source 1..20: mol_type = other RNA
cgattctagtgactacttcc

SEQ ID NO: 8058 - RNA, 20 nt, synthetic construct
  misc_feature 1..20: note = source = /note="Description of Artificial Sequence: Synthetic oligonucleotide"
  source 1..20: mol_type = other RNA
gatcgattctagtgactact

SEQ ID NO: 8059 - RNA, 20 nt, synthetic construct
  misc_feature 1..20: note = source = /note="Description of Artificial Sequence: Synthetic oligonucleotide"
  source 1..20: mol_type = other RNA
attgtattttcctgttccac

SEQ ID NO: 8060 - RNA, 20 nt, synthetic construct
  misc_feature 1..20: note = source = /note="Description of Artificial Sequence: Synthetic oligonucleotide"
  source 1..20: mol_type = other RNA
gagatattgtattttcctgt

SEQ ID NO: 8061 - RNA, 20 nt, synthetic construct
  misc_feature 1..20: note = source = /note="Description of Artificial Sequence: Synthetic oligonucleotide"
  source 1..20: mol_type = other RNA
tcgacagagatattgtattt

SEQ ID NO: 8062 - RNA, 20 nt, synthetic construct
  misc_feature 1..20: note = source = /note="Description of Artificial Sequence: Synthetic oligonucleotide"
  source 1..20: mol_type = other RNA
tcaaccttcgatcgtcttca

SEQ ID NO: 8063 - RNA, 20 nt, synthetic construct
  misc_feature 1..20: note = source = /note="Description of Artificial Sequence: Synthetic oligonucleotide"
  source 1..20: mol_type = other RNA
ccttcgacgtcttctcttca

SEQ ID NO: 8064 - RNA, 20 nt, synthetic construct
  misc_feature 1..20: note = source = /note="Description of Artificial Sequence: Synthetic oligonucleotide"
  source 1..20: mol_type = other RNA
agtcaagatacttctcttac

SEQ ID NO: 8065 - RNA, 20 nt, synthetic construct
  misc_feature 1..20: note = source = /note="Description of Artificial Sequence: Synthetic oligonucleotide"
  source 1..20: mol_type = other RNA
ggtttcgaattaggtctcgt

SEQ ID NO: 8066 - RNA, 20 nt, synthetic construct
  misc_feature 1..20: note = source = /note="Description of Artificial Sequence: Synthetic oligonucleotide"
  source 1..20: mol_type = other RNA
acctctcgcgaaatcaccag

SEQ ID NO: 8067 - RNA, 20 nt, synthetic construct
  misc_feature 1..20: note = source = /note="Description of Artificial Sequence: Synthetic oligonucleotide"
  source 1..20: mol_type = other RNA
actatacctctcgcgaaatc

SEQ ID NO: 8068 - RNA, 20 nt, synthetic construct
  misc_feature 1..20: note = source = /note="Description of Artificial Sequence: Synthetic oligonucleotide"
  source 1..20: mol_type = other RNA
tttgccggaataacgactat

SEQ ID NO: 8069 - RNA, 20 nt, synthetic construct
  misc_feature 1..20: note = source = /note="Description of Artificial Sequence: Synthetic oligonucleotide"
  source 1..20: mol_type = other RNA
actttccattctttcgtttt

SEQ ID NO: 8070 - RNA, 20 nt, synthetic construct
  misc_feature 1..20: note = source = /note="Description of Artificial Sequence: Synthetic oligonucleotide"
  source 1..20: mol_type = other RNA
atgaggtcacttgtgtactt

SEQ ID NO: 8071 - RNA, 20 nt, synthetic construct
  misc_feature 1..20: note = source = /note="Description of Artificial Sequence: Synthetic oligonucleotide"
  source 1..20: mol_type = other RNA
acatttcctttttaagaact

SEQ ID NO: 8072 - RNA, 20 nt, synthetic construct
  misc_feature 1..20: note = source = /note="Description of Artificial Sequence: Synthetic oligonucleotide"
  source 1..20: mol_type = other RNA
atcggttcaacacttacatt

SEQ ID NO: 8073 - RNA, 20 nt, synthetic construct
  misc_feature 1..20: note = source = /note="Description of Artificial Sequence: Synthetic oligonucleotide"
  source 1..20: mol_type = other RNA
cggttctgtccgactttcga

SEQ ID NO: 8074 - RNA, 20 nt, synthetic construct
  misc_feature 1..20: note = source = /note="Description of Artificial Sequence: Synthetic oligonucleotide"
  source 1..20: mol_type = other RNA
ccgtacagttttcggttctg

SEQ ID NO: 8075 - RNA, 20 nt, synthetic construct
  misc_feature 1..20: note = source = /note="Description of Artificial Sequence: Synthetic oligonucleotide"
  source 1..20: mol_type = other RNA
atactgctcgattcactcct

SEQ ID NO: 8076 - RNA, 20 nt, synthetic construct
  misc_feature 1..20: note = source = /note="Description of Artificial Sequence: Synthetic oligonucleotide"
  source 1..20: mol_type = other RNA
atctatactgctcgattcac

SEQ ID NO: 8077 - RNA, 20 nt, synthetic construct
  misc_feature 1..20: note = source = /note="Description of Artificial Sequence: Synthetic oligonucleotide"
  source 1..20: mol_type = other RNA
ggagattcacaagttcactt

SEQ ID NO: 8078 - RNA, 20 nt, synthetic construct
  misc_feature 1..20: note = source = /note="Description of Artificial Sequence: Synthetic oligonucleotide"
  source 1..20: mol_type = other RNA
cggttaattattgggatgtc

SEQ ID NO: 8079 - RNA, 20 nt, synthetic construct
  misc_feature 1..20: note = source = /note="Description of Artificial Sequence: Synthetic oligonucleotide"
  source 1..20: mol_type = other RNA
ttgtgttgttataactttaa

SEQ ID NO: 8080 - RNA, 20 nt, synthetic construct
  misc_feature 1..20: note = source = /note="Description of Artificial Sequence: Synthetic oligonucleotide"
  source 1..20: mol_type = other RNA
acccgagagagggagaggga

SEQ ID NO: 8081 - RNA, 20 nt, synthetic construct
  misc_feature 1..20: note = source = /note="Description of Artificial Sequence: Synthetic oligonucleotide"
  source 1..20: mol_type = other RNA
aacccgagagagggagaggg

SEQ ID NO: 8082 - RNA, 20 nt, synthetic construct
  misc_feature 1..20: note = source = /note="Description of Artificial Sequence: Synthetic oligonucleotide"
  source 1..20: mol_type = other RNA
cgagatagttggtcggcaaa

SEQ ID NO: 8083 - RNA, 20 nt, synthetic construct
  misc_feature 1..20: note = source = /note="Description of Artificial Sequence: Synthetic oligonucleotide"
  source 1..20: mol_type = other RNA
acgagatagttggtcggcaa

SEQ ID NO: 8084 - RNA, 20 nt, synthetic construct
  misc_feature 1..20: note = source = /note="Description of Artificial Sequence: Synthetic oligonucleotide"
  source 1..20: mol_type = other RNA
gcatgggtattagaccattt

SEQ ID NO: 8085 - RNA, 20 nt, synthetic construct
  misc_feature 1..20: note = source = /note="Description of Artificial Sequence: Synthetic oligonucleotide"
  source 1..20: mol_type = other RNA
gtgtttggcatgggtattag

SEQ ID NO: 8086 - RNA, 20 nt, synthetic construct
  misc_feature 1..20: note = source = /note="Description of Artificial Sequence: Synthetic oligonucleotide"
  source 1..20: mol_type = other RNA
aatgataagattaaaaaccc

SEQ ID NO: 8087 - RNA, 20 nt, synthetic construct
  misc_feature 1..20: note = source = /note="Description of Artificial Sequence: Synthetic oligonucleotide"
  source 1..20: mol_type = other RNA
caatgataagattaaaaacc

SEQ ID NO: 8088 - RNA, 20 nt, synthetic construct
  misc_feature 1..20: note = source = /note="Description of Artificial Sequence: Synthetic oligonucleotide"
  source 1..20: mol_type = other RNA
acaatgataagattaaaaac

SEQ ID NO: 8089 - RNA, 20 nt, synthetic construct
  misc_feature 1..20: note = source = /note="Description of Artificial Sequence: Synthetic oligonucleotide"
  source 1..20: mol_type = other RNA
tacaatgataagattaaaaa

SEQ ID NO: 8090 - RNA, 20 nt, synthetic construct
  misc_feature 1..20: note = source = /note="Description of Artificial Sequence: Synthetic oligonucleotide"
  source 1..20: mol_type = other RNA
ctacaatgataagattaaaa

SEQ ID NO: 8091 - RNA, 20 nt, synthetic construct
  misc_feature 1..20: note = source = /note="Description of Artificial Sequence: Synthetic oligonucleotide"
  source 1..20: mol_type = other RNA
caaataataataaatacaat

SEQ ID NO: 8092 - RNA, 20 nt, synthetic construct
  misc_feature 1..20: note = source = /note="Description of Artificial Sequence: Synthetic oligonucleotide"
  source 1..20: mol_type = other RNA
gtacagagacatagtgtaaa

SEQ ID NO: 8093 - RNA, 20 nt, synthetic construct
  misc_feature 1..20: note = source = /note="Description of Artificial Sequence: Synthetic oligonucleotide"
  source 1..20: mol_type = other RNA
aaaatgtttgacttccaaac

SEQ ID NO: 8094 - RNA, 20 nt, synthetic construct
  misc_feature 1..20: note = source = /note="Description of Artificial Sequence: Synthetic oligonucleotide"
  source 1..20: mol_type = other RNA
gacactgaaaatgtttgact

SEQ ID NO: 8095 - RNA, 20 nt, synthetic construct
  misc_feature 1..20: note = source = /note="Description of Artificial Sequence: Synthetic oligonucleotide"
  source 1..20: mol_type = other RNA
aaagctttttttaaaaatag

SEQ ID NO: 8096 - RNA, 20 nt, synthetic construct
  misc_feature 1..20: note = source = /note="Description of Artificial Sequence: Synthetic oligonucleotide"
  source 1..20: mol_type = other RNA
agggaaaacatggcacgggt

SEQ ID NO: 8097 - RNA, 20 nt, synthetic construct
  misc_feature 1..20: note = source = /note="Description of Artificial Sequence: Synthetic oligonucleotide"
  source 1..20: mol_type = other RNA
caagagggaaaacatggcac

SEQ ID NO: 8098 - RNA, 20 nt, synthetic construct
  misc_feature 1..20: note = source = /note="Description of Artificial Sequence: Synthetic oligonucleotide"
  source 1..20: mol_type = other RNA
gcaagagggaaaacatggca

SEQ ID NO: 8099 - RNA, 20 nt, synthetic construct
  misc_feature 1..20: note = source = /note="Description of Artificial Sequence: Synthetic oligonucleotide"
  source 1..20: mol_type = other RNA
tcattgcaagagggaaaaca

SEQ ID NO: 8100 - RNA, 20 nt, synthetic construct
  misc_feature 1..20: note = source = /note="Description of Artificial Sequence: Synthetic oligonucleotide"
  source 1..20: mol_type = other RNA
tggggtatctcattgcaaga

SEQ ID NO: 8101 - RNA, 20 nt, synthetic construct
  misc_feature 1..20: note = source = /note="Description of Artificial Sequence: Synthetic oligonucleotide"
  source 1..20: mol_type = other RNA
gtggggtatctcattgcaag

SEQ ID NO: 8102 - RNA, 20 nt, synthetic construct
  misc_feature 1..20: note = source = /note="Description of Artificial Sequence: Synthetic oligonucleotide"
  source 1..20: mol_type = other RNA
ccatccttctacacagtgtg

SEQ ID NO: 8103 - RNA, 20 nt, synthetic construct
  misc_feature 1..20: note = source = /note="Description of Artificial Sequence: Synthetic oligonucleotide"
  source 1..20: mol_type = other RNA
tccatccttctacacagtgt

SEQ ID NO: 8104 - RNA, 20 nt, synthetic construct
  misc_feature 1..20: note = source = /note="Description of Artificial Sequence: Synthetic oligonucleotide"
  source 1..20: mol_type = other RNA
ctccatccttctacacagtg

SEQ ID NO: 8105 - RNA, 20 nt, synthetic construct
  misc_feature 1..20: note = source = /note="Description of Artificial Sequence: Synthetic oligonucleotide"
  source 1..20: mol_type = other RNA
cacacgcaaagagggacagt

SEQ ID NO: 8106 - RNA, 20 nt, synthetic construct
  misc_feature 1..20: note = source = /note="Description of Artificial Sequence: Synthetic oligonucleotide"
  source 1..20: mol_type = other RNA
ttaataaccacacgcaaaga

SEQ ID NO: 8107 - RNA, 20 nt, synthetic construct
  misc_feature 1..20: note = source = /note="Description of Artificial Sequence: Synthetic oligonucleotide"
  source 1..20: mol_type = other RNA
cttaataaccacacgcaaag

SEQ ID NO: 8108 - RNA, 20 nt, synthetic construct
  misc_feature 1..20: note = source = /note="Description of Artificial Sequence: Synthetic oligonucleotide"
  source 1..20: mol_type = other RNA
tgtggtgttttagcccagtg

SEQ ID NO: 8109 - RNA, 20 nt, synthetic construct
  misc_feature 1..20: note = source = /note="Description of Artificial Sequence: Synthetic oligonucleotide"
  source 1..20: mol_type = other RNA
aatattatctatgagatgtg

SEQ ID NO: 8110 - RNA, 20 nt, synthetic construct
  misc_feature 1..20: note = source = /note="Description of Artificial Sequence: Synthetic oligonucleotide"
  source 1..20: mol_type = other RNA
aaaagtgggaagataggggt

SEQ ID NO: 8111 - RNA, 20 nt, synthetic construct
  misc_feature 1..20: note = source = /note="Description of Artificial Sequence: Synthetic oligonucleotide"
  source 1..20: mol_type = other RNA
gaaaagtgggaagatagggg

SEQ ID NO: 8112 - RNA, 20 nt, synthetic construct
  misc_feature 1..20: note = source = /note="Description of Artificial Sequence: Synthetic oligonucleotide"
  source 1..20: mol_type = other RNA
atggaaaagtgggaagatag

SEQ ID NO: 8113 - RNA, 20 nt, synthetic construct
  misc_feature 1..20: note = source = /note="Description of Artificial Sequence: Synthetic oligonucleotide"
  source 1..20: mol_type = other RNA
gatggaaaagtgggaagata

SEQ ID NO: 8114 - RNA, 20 nt, synthetic construct
  misc_feature 1..20: note = source = /note="Description of Artificial Sequence: Synthetic oligonucleotide"
  source 1..20: mol_type = other RNA
agatggaaaagtgggaagat

SEQ ID NO: 8115 - RNA, 20 nt, synthetic construct
  misc_feature 1..20: note = source = /note="Description of Artificial Sequence: Synthetic oligonucleotide"
  source 1..20: mol_type = other RNA
accaacaaagatggaaaagt

SEQ ID NO: 8116 - RNA, 20 nt, synthetic construct
  misc_feature 1..20: note = source = /note="Description of Artificial Sequence: Synthetic oligonucleotide"
  source 1..20: mol_type = other RNA
aaccaacaaagatggaaaag

SEQ ID NO: 8117 - RNA, 20 nt, synthetic construct
  misc_feature 1..20: note = source = /note="Description of Artificial Sequence: Synthetic oligonucleotide"
  source 1..20: mol_type = other RNA
ctgttgcaaaccaacaaaga

SEQ ID NO: 8118 - RNA, 20 nt, synthetic construct
  misc_feature 1..20: note = source = /note="Description of Artificial Sequence: Synthetic oligonucleotide"
  source 1..20: mol_type = other RNA
gagagtcaggcaaaaagaag

SEQ ID NO: 8119 - RNA, 20 nt, synthetic construct
  misc_feature 1..20: note = source = /note="Description of Artificial Sequence: Synthetic oligonucleotide"
  source 1..20: mol_type = other RNA
ggagagtcaggcaaaaagaa

SEQ ID NO: 8120 - RNA, 20 nt, synthetic construct
  misc_feature 1..20: note = source = /note="Description of Artificial Sequence: Synthetic oligonucleotide"
  source 1..20: mol_type = other RNA
tggagagtcaggcaaaaaga

SEQ ID NO: 8121 - RNA, 20 nt, synthetic construct
  misc_feature 1..20: note = source = /note="Description of Artificial Sequence: Synthetic oligonucleotide"
  source 1..20: mol_type = other RNA
agagaaaatcctggagagtc

SEQ ID NO: 8122 - RNA, 20 nt, synthetic construct
  misc_feature 1..20: note = source = /note="Description of Artificial Sequence: Synthetic oligonucleotide"
  source 1..20: mol_type = other RNA
tttatgatgagagaaaatcc

SEQ ID NO: 8123 - RNA, 20 nt, synthetic construct
  misc_feature 1..20: note = source = /note="Description of Artificial Sequence: Synthetic oligonucleotide"
  source 1..20: mol_type = other RNA
tattgcttggtttattgtca

SEQ ID NO: 8124 - RNA, 20 nt, synthetic construct
  misc_feature 1..20: note = source = /note="Description of Artificial Sequence: Synthetic oligonucleotide"
  source 1..20: mol_type = other RNA
cccacccccagaatattgct

SEQ ID NO: 8125 - RNA, 20 nt, synthetic construct
  misc_feature 1..20: note = source = /note="Description of Artificial Sequence: Synthetic oligonucleotide"
  source 1..20: mol_type = other RNA
ctggaagcctacctattact

SEQ ID NO: 8126 - RNA, 20 nt, synthetic construct
  misc_feature 1..20: note = source = /note="Description of Artificial Sequence: Synthetic oligonucleotide"
  source 1..20: mol_type = other RNA
aaaaaacatttaaagctaac

SEQ ID NO: 8127 - RNA, 20 nt, synthetic construct
  misc_feature 1..20: note = source = /note="Description of Artificial Sequence: Synthetic oligonucleotide"
  source 1..20: mol_type = other RNA
tacaatccaattttttgagc

SEQ ID NO: 8128 - RNA, 20 nt, synthetic construct
  misc_feature 1..20: note = source = /note="Description of Artificial Sequence: Synthetic oligonucleotide"
  source 1..20: mol_type = other RNA
ctaaacaaagaatacagtga

SEQ ID NO: 8129 - RNA, 20 nt, synthetic construct
  misc_feature 1..20: note = source = /note="Description of Artificial Sequence: Synthetic oligonucleotide"
  source 1..20: mol_type = other RNA
actaaacaaagaatacagtg

SEQ ID NO: 8130 - RNA, 20 nt, synthetic construct
  misc_feature 1..20: note = source = /note="Description of Artificial Sequence: Synthetic oligonucleotide"
  source 1..20: mol_type = other RNA
atatattacatttcagatat

SEQ ID NO: 8131 - RNA, 20 nt, synthetic construct
  misc_feature 1..20: note = source = /note="Description of Artificial Sequence: Synthetic oligonucleotide"
  source 1..20: mol_type = other RNA
aatatattacatttcagata

SEQ ID NO: 8132 - RNA, 20 nt, synthetic construct
  misc_feature 1..20: note = source = /note="Description of Artificial Sequence: Synthetic oligonucleotide"
  source 1..20: mol_type = other RNA
tatatgtacatgctggttgt

SEQ ID NO: 8133 - RNA, 20 nt, synthetic construct
  misc_feature 1..20: note = source = /note="Description of Artificial Sequence: Synthetic oligonucleotide"
  source 1..20: mol_type = other RNA
aattaagtatatgtacatgc

SEQ ID NO: 8134 - RNA, 20 nt, synthetic construct
  misc_feature 1..20: note = source = /note="Description of Artificial Sequence: Synthetic oligonucleotide"
  source 1..20: mol_type = other RNA
ctttaaaatgagtagattga

SEQ ID NO: 8135 - RNA, 20 nt, synthetic construct
  misc_feature 1..20: note = source = /note="Description of Artificial Sequence: Synthetic oligonucleotide"
  source 1..20: mol_type = other RNA
aacccccaactacacattaa

SEQ ID NO: 8136 - RNA, 20 nt, synthetic construct
  misc_feature 1..20: note = source = /note="Description of Artificial Sequence: Synthetic oligonucleotide"
  source 1..20: mol_type = other RNA
taacccccaactacacatta

SEQ ID NO: 8137 - RNA, 20 nt, synthetic construct
  misc_feature 1..20: note = source = /note="Description of Artificial Sequence: Synthetic oligonucleotide"
  source 1..20: mol_type = other RNA
ctcaattatactaaatataa

SEQ ID NO: 8138 - RNA, 20 nt, synthetic construct
  misc_feature 1..20: note = source = /note="Description of Artificial Sequence: Synthetic oligonucleotide"
  source 1..20: mol_type = other RNA
aagaaaggtaattaacgcaa

SEQ ID NO: 8139 - RNA, 20 nt, synthetic construct
  misc_feature 1..20: note = source = /note="Description of Artificial Sequence: Synthetic oligonucleotide"
  source 1..20: mol_type = other RNA
ggtaattaacgcaaaggcac

SEQ ID NO: 8140 - RNA, 20 nt, synthetic construct
  misc_feature 1..20: note = source = /note="Description of Artificial Sequence: Synthetic oligonucleotide"
  source 1..20: mol_type = other RNA
gtaattaacgcaaaggcaca

SEQ ID NO: 8141 - RNA, 20 nt, synthetic construct
  misc_feature 1..20: note = source = /note="Description of Artificial Sequence: Synthetic oligonucleotide"
  source 1..20: mol_type = other RNA
taaattgagtaattattagt

SEQ ID NO: 8142 - RNA, 20 nt, synthetic construct
  misc_feature 1..20: note = source = /note="Description of Artificial Sequence: Synthetic oligonucleotide"
  source 1..20: mol_type = other RNA
ttagtaggcttagctattct

SEQ ID NO: 8143 - RNA, 20 nt, synthetic construct
  misc_feature 1..20: note = source = /note="Description of Artificial Sequence: Synthetic oligonucleotide"
  source 1..20: mol_type = other RNA
tagtaggcttagctattcta

SEQ ID NO: 8144 - RNA, 20 nt, synthetic construct
  misc_feature 1..20: note = source = /note="Description of Artificial Sequence: Synthetic oligonucleotide"
  source 1..20: mol_type = other RNA
agagagtcacaatatttgac

SEQ ID NO: 8145 - RNA, 20 nt, synthetic construct
  misc_feature 1..20: note = source = /note="Description of Artificial Sequence: Synthetic oligonucleotide"
  source 1..20: mol_type = other RNA
aggactaatagtctgctagc

SEQ ID NO: 8146 - RNA, 20 nt, synthetic construct
  misc_feature 1..20: note = source = /note="Description of Artificial Sequence: Synthetic oligonucleotide"
  source 1..20: mol_type = other RNA
aatagtctgctagctggcac

SEQ ID NO: 8147 - RNA, 20 nt, synthetic construct
  misc_feature 1..20: note = source = /note="Description of Artificial Sequence: Synthetic oligonucleotide"
  source 1..20: mol_type = other RNA
acaggctgcccactttgcga

SEQ ID NO: 8148 - RNA, 20 nt, synthetic construct
  misc_feature 1..20: note = source = /note="Description of Artificial Sequence: Synthetic oligonucleotide"
  source 1..20: mol_type = other RNA
cgatggatgccagaaaaccc

SEQ ID NO: 8149 - RNA, 20 nt, synthetic construct
  misc_feature 1..20: note = source = /note="Description of Artificial Sequence: Synthetic oligonucleotide"
  source 1..20: mol_type = other RNA
cagaaaacccaggcatgaac

SEQ ID NO: 8150 - RNA, 20 nt, synthetic construct
  misc_feature 1..20: note = source = /note="Description of Artificial Sequence: Synthetic oligonucleotide"
  source 1..20: mol_type = other RNA
acccaggcatgaacaggaat

SEQ ID NO: 8151 - RNA, 20 nt, synthetic construct
  misc_feature 1..20: note = source = /note="Description of Artificial Sequence: Synthetic oligonucleotide"
  source 1..20: mol_type = other RNA
tgaacaggaatcggccagcc

SEQ ID NO: 8152 - RNA, 20 nt, synthetic construct
  misc_feature 1..20: note = source = /note="Description of Artificial Sequence: Synthetic oligonucleotide"
  source 1..20: mol_type = other RNA
cagccaggctgccagccaca

SEQ ID NO: 8153 - RNA, 20 nt, synthetic construct
  misc_feature 1..20: note = source = /note="Description of Artificial Sequence: Synthetic oligonucleotide"
  source 1..20: mol_type = other RNA
ggctgccagccacaaggtac

SEQ ID NO: 8154 - RNA, 20 nt, synthetic construct
  misc_feature 1..20: note = source = /note="Description of Artificial Sequence: Synthetic oligonucleotide"
  source 1..20: mol_type = other RNA
cagccacaaggtactggcac

SEQ ID NO: 8155 - RNA, 20 nt, synthetic construct
  misc_feature 1..20: note = source = /note="Description of Artificial Sequence: Synthetic oligonucleotide"
  source 1..20: mol_type = other RNA
ctggcacaggctccaacgag

SEQ ID NO: 8156 - RNA, 20 nt, synthetic construct
  misc_feature 1..20: note = source = /note="Description of Artificial Sequence: Synthetic oligonucleotide"
  source 1..20: mol_type = other RNA
tccaacgagaggtcccactc

SEQ ID NO: 8157 - RNA, 20 nt, synthetic construct
  misc_feature 1..20: note = source = /note="Description of Artificial Sequence: Synthetic oligonucleotide"
  source 1..20: mol_type = other RNA
aagtgtcaaagcagaaagac

SEQ ID NO: 8158 - RNA, 20 nt, synthetic construct
  misc_feature 1..20: note = source = /note="Description of Artificial Sequence: Synthetic oligonucleotide"
  source 1..20: mol_type = other RNA
gcagaaagactggtaaagtg

SEQ ID NO: 8159 - RNA, 20 nt, synthetic construct
  misc_feature 1..20: note = source = /note="Description of Artificial Sequence: Synthetic oligonucleotide"
  source 1..20: mol_type = other RNA
tttttttcgctatcaatcac

SEQ ID NO: 8160 - RNA, 20 nt, synthetic construct
  misc_feature 1..20: note = source = /note="Description of Artificial Sequence: Synthetic oligonucleotide"
  source 1..20: mol_type = other RNA
tgagcgagataatgcagaga

SEQ ID NO: 8161 - RNA, 20 nt, synthetic construct
  misc_feature 1..20: note = source = /note="Description of Artificial Sequence: Synthetic oligonucleotide"
  source 1..20: mol_type = other RNA
ctctgagctgttcttcttct

SEQ ID NO: 8162 - RNA, 20 nt, synthetic construct
  misc_feature 1..20: note = source = /note="Description of Artificial Sequence: Synthetic oligonucleotide"
  source 1..20: mol_type = other RNA
tctgagctgttcttcttcta

SEQ ID NO: 8163 - RNA, 20 nt, synthetic construct
  misc_feature 1..20: note = source = /note="Description of Artificial Sequence: Synthetic oligonucleotide"
  source 1..20: mol_type = other RNA
tagggtgccttttcattaag

SEQ ID NO: 8164 - RNA, 20 nt, synthetic construct
  misc_feature 1..20: note = source = /note="Description of Artificial Sequence: Synthetic oligonucleotide"
  source 1..20: mol_type = other RNA
gtgccttttcattaagaggt

SEQ ID NO: 8165 - RNA, 20 nt, synthetic construct
  misc_feature 1..20: note = source = /note="Description of Artificial Sequence: Synthetic oligonucleotide"
  source 1..20: mol_type = other RNA
gtattattattaaagtactt

SEQ ID NO: 8166 - RNA, 20 nt, synthetic construct
  misc_feature 1..20: note = source = /note="Description of Artificial Sequence: Synthetic oligonucleotide"
  source 1..20: mol_type = other RNA
ttaaagtacttaggatacat

SEQ ID NO: 8167 - RNA, 20 nt, synthetic construct
  misc_feature 1..20: note = source = /note="Description of Artificial Sequence: Synthetic oligonucleotide"
  source 1..20: mol_type = other RNA
taaagtacttaggatacatt

SEQ ID NO: 8168 - RNA, 20 nt, synthetic construct
  misc_feature 1..20: note = source = /note="Description of Artificial Sequence: Synthetic oligonucleotide"
  source 1..20: mol_type = other RNA
aaagtacttaggatacattg

SEQ ID NO: 8169 - RNA, 20 nt, synthetic construct
  misc_feature 1..20: note = source = /note="Description of Artificial Sequence: Synthetic oligonucleotide"
  source 1..20: mol_type = other RNA
taggatacattggggcagct

SEQ ID NO: 8170 - RNA, 20 nt, synthetic construct
  misc_feature 1..20: note = source = /note="Description of Artificial Sequence: Synthetic oligonucleotide"
  source 1..20: mol_type = other RNA
ttcactaaataatcatctag

SEQ ID NO: 8171 - RNA, 20 nt, synthetic construct
  misc_feature 1..20: note = source = /note="Description of Artificial Sequence: Synthetic oligonucleotide"
  source 1..20: mol_type = other RNA
taaataatcatctagtggcc

SEQ ID NO: 8172 - RNA, 20 nt, synthetic construct
  misc_feature 1..20: note = source = /note="Description of Artificial Sequence: Synthetic oligonucleotide"
  source 1..20: mol_type = other RNA
ttgttttttaaacaagcagt

SEQ ID NO: 8173 - RNA, 20 nt, synthetic construct
  misc_feature 1..20: note = source = /note="Description of Artificial Sequence: Synthetic oligonucleotide"
  source 1..20: mol_type = other RNA
ttttttaaacaagcagtagg

SEQ ID NO: 8174 - RNA, 20 nt, synthetic construct
  misc_feature 1..20: note = source = /note="Description of Artificial Sequence: Synthetic oligonucleotide"
  source 1..20: mol_type = other RNA
acaagcagtaggtggtgctt

SEQ ID NO: 8175 - RNA, 20 nt, synthetic construct
  misc_feature 1..20: note = source = /note="Description of Artificial Sequence: Synthetic oligonucleotide"
  source 1..20: mol_type = other RNA
taggtggtgctttggtcata

SEQ ID NO: 8176 - RNA, 20 nt, synthetic construct
  misc_feature 1..20: note = source = /note="Description of Artificial Sequence: Synthetic oligonucleotide"
  source 1..20: mol_type = other RNA
aggtggtgctttggtcataa

SEQ ID NO: 8177 - RNA, 20 nt, synthetic construct
  misc_feature 1..20: note = source = /note="Description of Artificial Sequence: Synthetic oligonucleotide"
  source 1..20: mol_type = other RNA
ggaagatatagtctatttct

SEQ ID NO: 8178 - RNA, 20 nt, synthetic construct
  misc_feature 1..20: note = source = /note="Description of Artificial Sequence: Synthetic oligonucleotide"
  source 1..20: mol_type = other RNA
actattccatattttccatg

SEQ ID NO: 8179 - RNA, 20 nt, synthetic construct
  misc_feature 1..20: note = source = /note="Description of Artificial Sequence: Synthetic oligonucleotide"
  source 1..20: mol_type = other RNA
ttccatattttccatgtggc

SEQ ID NO: 8180 - RNA, 20 nt, synthetic construct
  misc_feature 1..20: note = source = /note="Description of Artificial Sequence: Synthetic oligonucleotide"
  source 1..20: mol_type = other RNA
tctaaattgtgagacattct

SEQ ID NO: 8181 - RNA, 20 nt, synthetic construct
  misc_feature 1..20: note = source = /note="Description of Artificial Sequence: Synthetic oligonucleotide"
  source 1..20: mol_type = other RNA
aaattgtgagacattcttgg

SEQ ID NO: 8182 - RNA, 20 nt, synthetic construct
  misc_feature 1..20: note = source = /note="Description of Artificial Sequence: Synthetic oligonucleotide"
  source 1..20: mol_type = other RNA
taaaatagctaaatttagta

SEQ ID NO: 8183 - RNA, 20 nt, synthetic construct
  misc_feature 1..20: note = source = /note="Description of Artificial Sequence: Synthetic oligonucleotide"
  source 1..20: mol_type = other RNA
aaaatagctaaatttagtaa

SEQ ID NO: 8184 - RNA, 20 nt, synthetic construct
  misc_feature 1..20: note = source = /note="Description of Artificial Sequence: Synthetic oligonucleotide"
  source 1..20: mol_type = other RNA
atctgtacattttgatattg

SEQ ID NO: 8185 - RNA, 20 nt, synthetic construct
  misc_feature 1..20: note = source = /note="Description of Artificial Sequence: Synthetic oligonucleotide"
  source 1..20: mol_type = other RNA
tttgatattgaggaaaaaca

SEQ ID NO: 8186 - RNA, 20 nt, synthetic construct
  misc_feature 1..20: note = source = /note="Description of Artificial Sequence: Synthetic oligonucleotide"
  source 1..20: mol_type = other RNA
aaaccattatccagtttgct

SEQ ID NO: 8187 - RNA, 20 nt, synthetic construct
  misc_feature 1..20: note = source = /note="Description of Artificial Sequence: Synthetic oligonucleotide"
  source 1..20: mol_type = other RNA
taataaaccgttcatttctc

SEQ ID NO: 8188 - RNA, 20 nt, synthetic construct
  misc_feature 1..20: note = source = /note="Description of Artificial Sequence: Synthetic oligonucleotide"
  source 1..20: mol_type = other RNA
accgttcatttctcaggatg

SEQ ID NO: 8189 - RNA, 20 nt, synthetic construct
  misc_feature 1..20: note = source = /note="Description of Artificial Sequence: Synthetic oligonucleotide"
  source 1..20: mol_type = other RNA
aaaattctgacatatacaaa

SEQ ID NO: 8190 - RNA, 20 nt, synthetic construct
  misc_feature 1..20: note = source = /note="Description of Artificial Sequence: Synthetic oligonucleotide"
  source 1..20: mol_type = other RNA
actgctttgtgtgtgaaggc

SEQ ID NO: 8191 - RNA, 20 nt, synthetic construct
  misc_feature 1..20: note = source = /note="Description of Artificial Sequence: Synthetic oligonucleotide"
  source 1..20: mol_type = other RNA
gtttactgctttgtgtgtga

SEQ ID NO: 8192 - RNA, 20 nt, synthetic construct
  misc_feature 1..20: note = source = /note="Description of Artificial Sequence: Synthetic oligonucleotide"
  source 1..20: mol_type = other RNA
aatagcacagtgtgtagtgt

SEQ ID NO: 8193 - RNA, 20 nt, synthetic construct
  misc_feature 1..20: note = source = /note="Description of Artificial Sequence: Synthetic oligonucleotide"
  source 1..20: mol_type = other RNA
tgtcaaatattgtgactctc

SEQ ID NO: 8194 - RNA, 20 nt, synthetic construct
  misc_feature 1..20: note = source = /note="Description of Artificial Sequence: Synthetic oligonucleotide"
  source 1..20: mol_type = other RNA
tctggcatccatcgcaaagt

SEQ ID NO: 8195 - RNA, 20 nt, synthetic construct
  misc_feature 1..20: note = source = /note="Description of Artificial Sequence: Synthetic oligonucleotide"
  source 1..20: mol_type = other RNA
ttctggcatccatcgcaaag

SEQ ID NO: 8196 - RNA, 20 nt, synthetic construct
  misc_feature 1..20: note = source = /note="Description of Artificial Sequence: Synthetic oligonucleotide"
  source 1..20: mol_type = other RNA
ctgttcatgcctgggttttc

SEQ ID NO: 8197 - RNA, 20 nt, synthetic construct
  misc_feature 1..20: note = source = /note="Description of Artificial Sequence: Synthetic oligonucleotide"
  source 1..20: mol_type = other RNA
gccgattcctgttcatgcct

SEQ ID NO: 8198 - RNA, 20 nt, synthetic construct
  misc_feature 1..20: note = source = /note="Description of Artificial Sequence: Synthetic oligonucleotide"
  source 1..20: mol_type = other RNA
ggccgattcctgttcatgcc

SEQ ID NO: 8199 - RNA, 20 nt, synthetic construct
  misc_feature 1..20: note = source = /note="Description of Artificial Sequence: Synthetic oligonucleotide"
  source 1..20: mol_type = other RNA
cttgtggctggcagcctggc

SEQ ID NO: 8200 - RNA, 20 nt, synthetic construct
  misc_feature 1..20: note = source = /note="Description of Artificial Sequence: Synthetic oligonucleotide"
  source 1..20: mol_type = other RNA
gtaccttgtggctggcagcc

SEQ ID NO: 8201 - RNA, 20 nt, synthetic construct
  misc_feature 1..20: note = source = /note="Description of Artificial Sequence: Synthetic oligonucleotide"
  source 1..20: mol_type = other RNA
ctgtgccagtaccttgtggc

SEQ ID NO: 8202 - RNA, 20 nt, synthetic construct
  misc_feature 1..20: note = source = /note="Description of Artificial Sequence: Synthetic oligonucleotide"
  source 1..20: mol_type = other RNA
gagcctgtgccagtaccttg

SEQ ID NO: 8203 - RNA, 20 nt, synthetic construct
  misc_feature 1..20: note = source = /note="Description of Artificial Sequence: Synthetic oligonucleotide"
  source 1..20: mol_type = other RNA
gccagagtgggacctctcgt

SEQ ID NO: 8204 - RNA, 20 nt, synthetic construct
  misc_feature 1..20: note = source = /note="Description of Artificial Sequence: Synthetic oligonucleotide"
  source 1..20: mol_type = other RNA
tcaggtgggaaagccagagt

SEQ ID NO: 8205 - RNA, 20 nt, synthetic construct
  misc_feature 1..20: note = source = /note="Description of Artificial Sequence: Synthetic oligonucleotide"
  source 1..20: mol_type = other RNA
atcaggtgggaaagccagag

SEQ ID NO: 8206 - RNA, 20 nt, synthetic construct
  misc_feature 1..20: note = source = /note="Description of Artificial Sequence: Synthetic oligonucleotide"
  source 1..20: mol_type = other RNA
ttgacactttattatcaggt

SEQ ID NO: 8207 - RNA, 20 nt, synthetic construct
  misc_feature 1..20: note = source = /note="Description of Artificial Sequence: Synthetic oligonucleotide"
  source 1..20: mol_type = other RNA
tttgacactttattatcagg

SEQ ID NO: 8208 - RNA, 20 nt, synthetic construct
  misc_feature 1..20: note = source = /note="Description of Artificial Sequence: Synthetic oligonucleotide"
  source 1..20: mol_type = other RNA
tgctttgacactttattatc

SEQ ID NO: 8209 - RNA, 20 nt, synthetic construct
  misc_feature 1..20: note = source = /note="Description of Artificial Sequence: Synthetic oligonucleotide"
  source 1..20: mol_type = other RNA
actaggtgaatttaattcag

SEQ ID NO: 8210 - RNA, 20 nt, synthetic construct
  misc_feature 1..20: note = source = /note="Description of Artificial Sequence: Synthetic oligonucleotide"
  source 1..20: mol_type = other RNA
aagtactcatttgcaacact

SEQ ID NO: 8211 - RNA, 20 nt, synthetic construct
  misc_feature 1..20: note = source = /note="Description of Artificial Sequence: Synthetic oligonucleotide"
  source 1..20: mol_type = other RNA
tcacacttgctctcttttta

SEQ ID NO: 8212 - RNA, 20 nt, synthetic construct
  misc_feature 1..20: note = source = /note="Description of Artificial Sequence: Synthetic oligonucleotide"
  source 1..20: mol_type = other RNA
atagcgaaaaaaaaaaaaaa

SEQ ID NO: 8213 - RNA, 20 nt, synthetic construct
  misc_feature 1..20: note = source = /note="Description of Artificial Sequence: Synthetic oligonucleotide"
  source 1..20: mol_type = other RNA
tcttctacatgcaggagtaa

SEQ ID NO: 8214 - RNA, 20 nt, synthetic construct
  misc_feature 1..20: note = source = /note="Description of Artificial Sequence: Synthetic oligonucleotide"
  source 1..20: mol_type = other RNA
cataagagtcttctacatgc

SEQ ID NO: 8215 - RNA, 20 nt, synthetic construct
  misc_feature 1..20: note = source = /note="Description of Artificial Sequence: Synthetic oligonucleotide"
  source 1..20: mol_type = other RNA
gctgtataaatttatatgaa

SEQ ID NO: 8216 - RNA, 20 nt, synthetic construct
  misc_feature 1..20: note = source = /note="Description of Artificial Sequence: Synthetic oligonucleotide"
  source 1..20: mol_type = other RNA
ctgcctacctcttaatgaaa

SEQ ID NO: 8217 - RNA, 20 nt, synthetic construct
  misc_feature 1..20: note = source = /note="Description of Artificial Sequence: Synthetic oligonucleotide"
  source 1..20: mol_type = other RNA
agaaatgaataatttggaaa

SEQ ID NO: 8218 - RNA, 20 nt, synthetic construct
  misc_feature 1..20: note = source = /note="Description of Artificial Sequence: Synthetic oligonucleotide"
  source 1..20: mol_type = other RNA
taatttagaaatgaataatt

SEQ ID NO: 8219 - RNA, 20 nt, synthetic construct
  misc_feature 1..20: note = source = /note="Description of Artificial Sequence: Synthetic oligonucleotide"
  source 1..20: mol_type = other RNA
ggaaattcactatttctgcc

SEQ ID NO: 8220 - RNA, 20 nt, synthetic construct
  misc_feature 1..20: note = source = /note="Description of Artificial Sequence: Synthetic oligonucleotide"
  source 1..20: mol_type = other RNA
gttgttttttttggcactta

SEQ ID NO: 8221 - RNA, 20 nt, synthetic construct
  misc_feature 1..20: note = source = /note="Description of Artificial Sequence: Synthetic oligonucleotide"
  source 1..20: mol_type = other RNA
tgttgttttttttggcactt

SEQ ID NO: 8222 - RNA, 20 nt, synthetic construct
  misc_feature 1..20: note = source = /note="Description of Artificial Sequence: Synthetic oligonucleotide"
  source 1..20: mol_type = other RNA
tgtttttttgttgttttttt

SEQ ID NO: 8223 - RNA, 20 nt, synthetic construct
  misc_feature 1..20: note = source = /note="Description of Artificial Sequence: Synthetic oligonucleotide"
  source 1..20: mol_type = other RNA
atccagccacatggaaaata

SEQ ID NO: 8224 - RNA, 20 nt, synthetic construct
  misc_feature 1..20: note = source = /note="Description of Artificial Sequence: Synthetic oligonucleotide"
  source 1..20: mol_type = other RNA
atagttagtatccagccaca

SEQ ID NO: 8225 - RNA, 20 nt, synthetic construct
  misc_feature 1..20: note = source = /note="Description of Artificial Sequence: Synthetic oligonucleotide"
  source 1..20: mol_type = other RNA
cacaatttagaaaaggaggc

SEQ ID NO: 8226 - RNA, 20 nt, synthetic construct
  misc_feature 1..20: note = source = /note="Description of Artificial Sequence: Synthetic oligonucleotide"
  source 1..20: mol_type = other RNA
gtctcacaatttagaaaagg

SEQ ID NO: 8227 - RNA, 20 nt, synthetic construct
  misc_feature 1..20: note = source = /note="Description of Artificial Sequence: Synthetic oligonucleotide"
  source 1..20: mol_type = other RNA
aatgtctcacaatttagaaa

SEQ ID NO: 8228 - RNA, 20 nt, synthetic construct
  misc_feature 1..20: note = source = /note="Description of Artificial Sequence: Synthetic oligonucleotide"
  source 1..20: mol_type = other RNA
tttagctattttaaaacttg

SEQ ID NO: 8229 - RNA, 20 nt, synthetic construct
  misc_feature 1..20: note = source = /note="Description of Artificial Sequence: Synthetic oligonucleotide"
  source 1..20: mol_type = other RNA
atttagctattttaaaactt

SEQ ID NO: 8230 - RNA, 20 nt, synthetic construct
  misc_feature 1..20: note = source = /note="Description of Artificial Sequence: Synthetic oligonucleotide"
  source 1..20: mol_type = other RNA
aatttagctattttaaaact

SEQ ID NO: 8231 - RNA, 20 nt, synthetic construct
  misc_feature 1..20: note = source = /note="Description of Artificial Sequence: Synthetic oligonucleotide"
  source 1..20: mol_type = other RNA
tttcacaaagcacaaaattc

SEQ ID NO: 8232 - RNA, 20 nt, synthetic construct
  misc_feature 1..20: note = source = /note="Description of Artificial Sequence: Synthetic oligonucleotide"
  source 1..20: mol_type = other RNA
aattacatgtgggtgaaaat

SEQ ID NO: 8233 - RNA, 20 nt, synthetic construct
  misc_feature 1..20: note = source = /note="Description of Artificial Sequence: Synthetic oligonucleotide"
  source 1..20: mol_type = other RNA
aaattacatgtgggtgaaaa

SEQ ID NO: 8234 - RNA, 20 nt, synthetic construct
  misc_feature 1..20: note = source = /note="Description of Artificial Sequence: Synthetic oligonucleotide"
  source 1..20: mol_type = other RNA
ctattttgtaaattacatgt

SEQ ID NO: 8235 - RNA, 20 nt, synthetic construct
  misc_feature 1..20: note = source = /note="Description of Artificial Sequence: Synthetic oligonucleotide"
  source 1..20: mol_type = other RNA
actattttgtaaattacatg

SEQ ID NO: 8236 - RNA, 20 nt, synthetic construct
  misc_feature 1..20: note = source = /note="Description of Artificial Sequence: Synthetic oligonucleotide"
  source 1..20: mol_type = other RNA
acgccaagcaaactggataa

SEQ ID NO: 8237 - RNA, 20 nt, synthetic construct
  misc_feature 1..20: note = source = /note="Description of Artificial Sequence: Synthetic oligonucleotide"
  source 1..20: mol_type = other RNA
caggtctacgccaagcaaac

SEQ ID NO: 8238 - RNA, 20 nt, synthetic construct
  misc_feature 1..20: note = source = /note="Description of Artificial Sequence: Synthetic oligonucleotide"
  source 1..20: mol_type = other RNA
cggtttattattttttaaac

SEQ ID NO: 8239 - RNA, 20 nt, synthetic construct
  misc_feature 1..20: note = source = /note="Description of Artificial Sequence: Synthetic oligonucleotide"
  source 1..20: mol_type = other RNA
accacatcctgagaaatgaa

SEQ ID NO: 8240 - RNA, 20 nt, synthetic construct
  misc_feature 1..20: note = source = /note="Description of Artificial Sequence: Synthetic oligonucleotide"
  source 1..20: mol_type = other RNA
aattagcaaatgaattcaag

SEQ ID NO: 8241 - RNA, 20 nt, synthetic construct
  misc_feature 1..20: note = source = /note="Description of Artificial Sequence: Synthetic oligonucleotide"
  source 1..20: mol_type = other RNA
gtgtgacttgataaagcctt

SEQ ID NO: 8242 - RNA, 20 nt, synthetic construct
  misc_feature 1..20: note = source = /note="Description of Artificial Sequence: Synthetic oligonucleotide"
  source 1..20: mol_type = other RNA
aagcctttggtcttaaatct

SEQ ID NO: 8243 - RNA, 20 nt, synthetic construct
  misc_feature 1..20: note = source = /note="Description of Artificial Sequence: Synthetic oligonucleotide"
  source 1..20: mol_type = other RNA
agcctttggtcttaaatctt

SEQ ID NO: 8244 - RNA, 20 nt, synthetic construct
  misc_feature 1..20: note = source = /note="Description of Artificial Sequence: Synthetic oligonucleotide"
  source 1..20: mol_type = other RNA
gtaaatctgaccctgagaat

SEQ ID NO: 8245 - RNA, 20 nt, synthetic construct
  misc_feature 1..20: note = source = /note="Description of Artificial Sequence: Synthetic oligonucleotide"
  source 1..20: mol_type = other RNA
taaatctgaccctgagaatt

SEQ ID NO: 8246 - RNA, 20 nt, synthetic construct
  misc_feature 1..20: note = source = /note="Description of Artificial Sequence: Synthetic oligonucleotide"
  source 1..20: mol_type = other RNA
atgtgttatctcttaagaag

SEQ ID NO: 8247 - RNA, 20 nt, synthetic construct
  misc_feature 1..20: note = source = /note="Description of Artificial Sequence: Synthetic oligonucleotide"
  source 1..20: mol_type = other RNA
attgaaataatttagtgatg

SEQ ID NO: 8248 - RNA, 20 nt, synthetic construct
  misc_feature 1..20: note = source = /note="Description of Artificial Sequence: Synthetic oligonucleotide"
  source 1..20: mol_type = other RNA
ataatttagtgatgaggaag

SEQ ID NO: 8249 - RNA, 20 nt, synthetic construct
  misc_feature 1..20: note = source = /note="Description of Artificial Sequence: Synthetic oligonucleotide"
  source 1..20: mol_type = other RNA
atgtatctttcatctagctc

SEQ ID NO: 8250 - RNA, 20 nt, synthetic construct
  misc_feature 1..20: note = source = /note="Description of Artificial Sequence: Synthetic oligonucleotide"
  source 1..20: mol_type = other RNA
tctagctctggttttaatgc

SEQ ID NO: 8251 - RNA, 20 nt, synthetic construct
  misc_feature 1..20: note = source = /note="Description of Artificial Sequence: Synthetic oligonucleotide"
  source 1..20: mol_type = other RNA
tttaattgtccccactgtac

SEQ ID NO: 8252 - RNA, 20 nt, synthetic construct
  misc_feature 1..20: note = source = /note="Description of Artificial Sequence: Synthetic oligonucleotide"
  source 1..20: mol_type = other RNA
ttaattgtccccactgtact

SEQ ID NO: 8253 - RNA, 20 nt, synthetic construct
  misc_feature 1..20: note = source = /note="Description of Artificial Sequence: Synthetic oligonucleotide"
  source 1..20: mol_type = other RNA
gtatagtctgctaaacatta

SEQ ID NO: 8254 - RNA, 20 nt, synthetic construct
  misc_feature 1..20: note = source = /note="Description of Artificial Sequence: Synthetic oligonucleotide"
  source 1..20: mol_type = other RNA
tctctccttgttctgatact

SEQ ID NO: 8255 - RNA, 20 nt, synthetic construct
  misc_feature 1..20: note = source = /note="Description of Artificial Sequence: Synthetic oligonucleotide"
  source 1..20: mol_type = other RNA
ctctccttgttctgatacta

SEQ ID NO: 8256 - RNA, 20 nt, synthetic construct
  misc_feature 1..20: note = source = /note="Description of Artificial Sequence: Synthetic oligonucleotide"
  source 1..20: mol_type = other RNA
caaagcccactttttataga

SEQ ID NO: 8257 - RNA, 20 nt, synthetic construct
  misc_feature 1..20: note = source = /note="Description of Artificial Sequence: Synthetic oligonucleotide"
  source 1..20: mol_type = other RNA
aaagcccactttttatagat

SEQ ID NO: 8258 - RNA, 20 nt, synthetic construct
  misc_feature 1..20: note = source = /note="Description of Artificial Sequence: Synthetic oligonucleotide"
  source 1..20: mol_type = other RNA
ttttatagatgggcagcaaa

SEQ ID NO: 8259 - RNA, 20 nt, synthetic construct
  misc_feature 1..20: note = source = /note="Description of Artificial Sequence: Synthetic oligonucleotide"
  source 1..20: mol_type = other RNA
atgggcagcaaaaggcacat

SEQ ID NO: 8260 - RNA, 20 nt, synthetic construct
  misc_feature 1..20: note = source = /note="Description of Artificial Sequence: Synthetic oligonucleotide"
  source 1..20: mol_type = other RNA
aagtgacccttgttttgttt

SEQ ID NO: 8261 - RNA, 20 nt, synthetic construct
  misc_feature 1..20: note = source = /note="Description of Artificial Sequence: Synthetic oligonucleotide"
  source 1..20: mol_type = other RNA
gacccttgttttgttttggt

SEQ ID NO: 8262 - RNA, 20 nt, synthetic construct
  misc_feature 1..20: note = source = /note="Description of Artificial Sequence: Synthetic oligonucleotide"
  source 1..20: mol_type = other RNA
acccttgttttgttttggtt

SEQ ID NO: 8263 - RNA, 20 nt, synthetic construct
  misc_feature 1..20: note = source = /note="Description of Artificial Sequence: Synthetic oligonucleotide"
  source 1..20: mol_type = other RNA
cccttgttttgttttggttg

SEQ ID NO: 8264 - RNA, 20 nt, synthetic construct
  misc_feature 1..20: note = source = /note="Description of Artificial Sequence: Synthetic oligonucleotide"
  source 1..20: mol_type = other RNA
ttgttttgttttggttgggg

SEQ ID NO: 8265 - RNA, 20 nt, synthetic construct
  misc_feature 1..20: note = source = /note="Description of Artificial Sequence: Synthetic oligonucleotide"
  source 1..20: mol_type = other RNA
tgttttgttttggttggggt

SEQ ID NO: 8266 - RNA, 20 nt, synthetic construct
  misc_feature 1..20: note = source = /note="Description of Artificial Sequence: Synthetic oligonucleotide"
  source 1..20: mol_type = other RNA
gttttgttttggttggggtg

SEQ ID NO: 8267 - RNA, 20 nt, synthetic construct
  misc_feature 1..20: note = source = /note="Description of Artificial Sequence: Synthetic oligonucleotide"
  source 1..20: mol_type = other RNA
ttttgttttggttggggtgg

SEQ ID NO: 8268 - RNA, 20 nt, synthetic construct
  misc_feature 1..20: note = source = /note="Description of Artificial Sequence: Synthetic oligonucleotide"
  source 1..20: mol_type = other RNA
tttgttttggttggggtggg

SEQ ID NO: 8269 - RNA, 20 nt, synthetic construct
  misc_feature 1..20: note = source = /note="Description of Artificial Sequence: Synthetic oligonucleotide"
  source 1..20: mol_type = other RNA
tggttggggtggggggtgtt

SEQ ID NO: 8270 - RNA, 20 nt, synthetic construct
  misc_feature 1..20: note = source = /note="Description of Artificial Sequence: Synthetic oligonucleotide"
  source 1..20: mol_type = other RNA
ggttggggtggggggtgttt

SEQ ID NO: 8271 - RNA, 20 nt, synthetic construct
  misc_feature 1..20: note = source = /note="Description of Artificial Sequence: Synthetic oligonucleotide"
  source 1..20: mol_type = other RNA
ggggtggggggtgtttggga

SEQ ID NO: 8272 - RNA, 20 nt, synthetic construct
  misc_feature 1..20: note = source = /note="Description of Artificial Sequence: Synthetic oligonucleotide"
  source 1..20: mol_type = other RNA
acacttacccacttagcaat

SEQ ID NO: 8273 - RNA, 20 nt, synthetic construct
  misc_feature 1..20: note = source = /note="Description of Artificial Sequence: Synthetic oligonucleotide"
  source 1..20: mol_type = other RNA
tgcccaagatttaagaccaa

SEQ ID NO: 8274 - RNA, 20 nt, synthetic construct
  misc_feature 1..20: note = source = /note="Description of Artificial Sequence: Synthetic oligonucleotide"
  source 1..20: mol_type = other RNA
tctgggtaacccaattctca

SEQ ID NO: 8275 - RNA, 20 nt, synthetic construct
  misc_feature 1..20: note = source = /note="Description of Artificial Sequence: Synthetic oligonucleotide"
  source 1..20: mol_type = other RNA
atctgggtaacccaattctc

SEQ ID NO: 8276 - RNA, 20 nt, synthetic construct
  misc_feature 1..20: note = source = /note="Description of Artificial Sequence: Synthetic oligonucleotide"
  source 1..20: mol_type = other RNA
ctggcatgagtctttgatct

SEQ ID NO: 8277 - RNA, 20 nt, synthetic construct
  misc_feature 1..20: note = source = /note="Description of Artificial Sequence: Synthetic oligonucleotide"
  source 1..20: mol_type = other RNA
actggcatgagtctttgatc

SEQ ID NO: 8278 - RNA, 20 nt, synthetic construct
  misc_feature 1..20: note = source = /note="Description of Artificial Sequence: Synthetic oligonucleotide"
  source 1..20: mol_type = other RNA
caggtaatgttctttttaac

SEQ ID NO: 8279 - RNA, 20 nt, synthetic construct
  misc_feature 1..20: note = source = /note="Description of Artificial Sequence: Synthetic oligonucleotide"
  source 1..20: mol_type = other RNA
taacacatgataaaaaatac

SEQ ID NO: 8280 - RNA, 20 nt, synthetic construct
  misc_feature 1..20: note = source = /note="Description of Artificial Sequence: Synthetic oligonucleotide"
  source 1..20: mol_type = other RNA
acatttagcaggcactagaa

SEQ ID NO: 8281 - RNA, 20 nt, synthetic construct
  misc_feature 1..20: note = source = /note="Description of Artificial Sequence: Synthetic oligonucleotide"
  source 1..20: mol_type = other RNA
agaaggattatacatttagc

SEQ ID NO: 8282 - RNA, 20 nt, synthetic construct
  misc_feature 1..20: note = source = /note="Description of Artificial Sequence: Synthetic oligonucleotide"
  source 1..20: mol_type = other RNA
gacaacttcacattctaaga

SEQ ID NO: 8283 - RNA, 20 nt, synthetic construct
  misc_feature 1..20: note = source = /note="Description of Artificial Sequence: Synthetic oligonucleotide"
  source 1..20: mol_type = other RNA
tgaaggtatttaaaagttta

SEQ ID NO: 8284 - RNA, 20 nt, synthetic construct
  misc_feature 1..20: note = source = /note="Description of Artificial Sequence: Synthetic oligonucleotide"
  source 1..20: mol_type = other RNA
acaatataaagattaactga

SEQ ID NO: 8285 - RNA, 20 nt, synthetic construct
  misc_feature 1..20: note = source = /note="Description of Artificial Sequence: Synthetic oligonucleotide"
  source 1..20: mol_type = other RNA
gatacataagtcttagttca

SEQ ID NO: 8286 - RNA, 20 nt, synthetic construct
  misc_feature 1..20: note = source = /note="Description of Artificial Sequence: Synthetic oligonucleotide"
  source 1..20: mol_type = other RNA
agactatacccagtacagtg

SEQ ID NO: 8287 - RNA, 20 nt, synthetic construct
  misc_feature 1..20: note = source = /note="Description of Artificial Sequence: Synthetic oligonucleotide"
  source 1..20: mol_type = other RNA
cagactatacccagtacagt

SEQ ID NO: 8288 - RNA, 20 nt, synthetic construct
  misc_feature 1..20: note = source = /note="Description of Artificial Sequence: Synthetic oligonucleotide"
  source 1..20: mol_type = other RNA
gcagactatacccagtacag

SEQ ID NO: 8289 - RNA, 20 nt, synthetic construct
  misc_feature 1..20: note = source = /note="Description of Artificial Sequence: Synthetic oligonucleotide"
  source 1..20: mol_type = other RNA
ttgaccctagtatcagaaca

SEQ ID NO: 8290 - RNA, 20 nt, synthetic construct
  misc_feature 1..20: note = source = /note="Description of Artificial Sequence: Synthetic oligonucleotide"
  source 1..20: mol_type = other RNA
gctgcccatctataaaaagt

SEQ ID NO: 8291 - RNA, 20 nt, synthetic construct
  misc_feature 1..20: note = source = /note="Description of Artificial Sequence: Synthetic oligonucleotide"
  source 1..20: mol_type = other RNA
tgctgcccatctataaaaag

SEQ ID NO: 8292 - RNA, 20 nt, synthetic construct
  misc_feature 1..20: note = source = /note="Description of Artificial Sequence: Synthetic oligonucleotide"
  source 1..20: mol_type = other RNA
tcatgtttagatcacaatta

SEQ ID NO: 8293 - RNA, 20 nt, synthetic construct
  misc_feature 1..20: note = source = /note="Description of Artificial Sequence: Synthetic oligonucleotide"
  source 1..20: mol_type = other RNA
atcatgtttagatcacaatt

SEQ ID NO: 8294 - RNA, 20 nt, synthetic construct
  misc_feature 1..20: note = source = /note="Description of Artificial Sequence: Synthetic oligonucleotide"
  source 1..20: mol_type = other RNA
gggtcacttgcagcagataa

SEQ ID NO: 8295 - RNA, 20 nt, synthetic construct
  misc_feature 1..20: note = source = /note="Description of Artificial Sequence: Synthetic oligonucleotide"
  source 1..20: mol_type = other RNA
agggtcacttgcagcagata

SEQ ID NO: 8296 - RNA, 20 nt, synthetic construct
  misc_feature 1..20: note = source = /note="Description of Artificial Sequence: Synthetic oligonucleotide"
  source 1..20: mol_type = other RNA
ccccaaccaaaacaaaacaa

SEQ ID NO: 8297 - RNA, 20 nt, synthetic construct
  misc_feature 1..20: note = source = /note="Description of Artificial Sequence: Synthetic oligonucleotide"
  source 1..20: mol_type = other RNA
accccaaccaaaacaaaaca

SEQ ID NO: 8298 - RNA, 20 nt, synthetic construct
  misc_feature 1..20: note = source = /note="Description of Artificial Sequence: Synthetic oligonucleotide"
  source 1..20: mol_type = other RNA
atgaagagtaagtgaagccc

SEQ ID NO: 8299 - RNA, 20 nt, synthetic construct
  misc_feature 1..20: note = source = /note="Description of Artificial Sequence: Synthetic oligonucleotide"
  source 1..20: mol_type = other RNA
tgaagagtaagtgaagccca

SEQ ID NO: 8300 - RNA, 20 nt, synthetic construct
  misc_feature 1..20: note = source = /note="Description of Artificial Sequence: Synthetic oligonucleotide"
  source 1..20: mol_type = other RNA
cagggcctctcccctctttg

SEQ ID NO: 8301 - RNA, 20 nt, synthetic construct
  misc_feature 1..20: note = source = /note="Description of Artificial Sequence: Synthetic oligonucleotide"
  source 1..20: mol_type = other RNA
ccctctttgcggccactgat

SEQ ID NO: 8302 - RNA, 20 nt, synthetic construct
  misc_feature 1..20: note = source = /note="Description of Artificial Sequence: Synthetic oligonucleotide"
  source 1..20: mol_type = other RNA
tgataggaaagcccaatctt

SEQ ID NO: 8303 - RNA, 20 nt, synthetic construct
  misc_feature 1..20: note = source = /note="Description of Artificial Sequence: Synthetic oligonucleotide"
  source 1..20: mol_type = other RNA
aagcccaatctttggttgaa

SEQ ID NO: 8304 - RNA, 20 nt, synthetic construct
  misc_feature 1..20: note = source = /note="Description of Artificial Sequence: Synthetic oligonucleotide"
  source 1..20: mol_type = other RNA
gcacttttacatttataaaa

SEQ ID NO: 8305 - RNA, 20 nt, synthetic construct
  misc_feature 1..20: note = source = /note="Description of Artificial Sequence: Synthetic oligonucleotide"
  source 1..20: mol_type = other RNA
cacttttacatttataaaat

SEQ ID NO: 8306 - RNA, 20 nt, synthetic construct
  misc_feature 1..20: note = source = /note="Description of Artificial Sequence: Synthetic oligonucleotide"
  source 1..20: mol_type = other RNA
tgggcatcaaaatgcctgtt

SEQ ID NO: 8307 - RNA, 20 nt, synthetic construct
  misc_feature 1..20: note = source = /note="Description of Artificial Sequence: Synthetic oligonucleotide"
  source 1..20: mol_type = other RNA
gtacagtttagccattaatt

SEQ ID NO: 8308 - RNA, 20 nt, synthetic construct
  misc_feature 1..20: note = source = /note="Description of Artificial Sequence: Synthetic oligonucleotide"
  source 1..20: mol_type = other RNA
tcagagtgtctgtaaccaca

SEQ ID NO: 8309 - RNA, 20 nt, synthetic construct
  misc_feature 1..20: note = source = /note="Description of Artificial Sequence: Synthetic oligonucleotide"
  source 1..20: mol_type = other RNA
tgctcacatgctacaagtga

SEQ ID NO: 8310 - RNA, 20 nt, synthetic construct
  misc_feature 1..20: note = source = /note="Description of Artificial Sequence: Synthetic oligonucleotide"
  source 1..20: mol_type = other RNA
agtgacggctcctgtgtgcc

SEQ ID NO: 8311 - RNA, 20 nt, synthetic construct
  misc_feature 1..20: note = source = /note="Description of Artificial Sequence: Synthetic oligonucleotide"
  source 1..20: mol_type = other RNA
gtaagtctaatgagaaactt

SEQ ID NO: 8312 - RNA, 20 nt, synthetic construct
  misc_feature 1..20: note = source = /note="Description of Artificial Sequence: Synthetic oligonucleotide"
  source 1..20: mol_type = other RNA
taagtctaatgagaaacttt

SEQ ID NO: 8313 - RNA, 20 nt, synthetic construct
  misc_feature 1..20: note = source = /note="Description of Artificial Sequence: Synthetic oligonucleotide"
  source 1..20: mol_type = other RNA
tgagaaactttgggattccc

SEQ ID NO: 8314 - RNA, 20 nt, synthetic construct
  misc_feature 1..20: note = source = /note="Description of Artificial Sequence: Synthetic oligonucleotide"
  source 1..20: mol_type = other RNA
ctaaatgatcagcaaattac

SEQ ID NO: 8315 - RNA, 20 nt, synthetic construct
  misc_feature 1..20: note = source = /note="Description of Artificial Sequence: Synthetic oligonucleotide"
  source 1..20: mol_type = other RNA
gatcagcaaattactggata

SEQ ID NO: 8316 - RNA, 20 nt, synthetic construct
  misc_feature 1..20: note = source = /note="Description of Artificial Sequence: Synthetic oligonucleotide"
  source 1..20: mol_type = other RNA
atggatatatattattttcc

SEQ ID NO: 8317 - RNA, 20 nt, synthetic construct
  misc_feature 1..20: note = source = /note="Description of Artificial Sequence: Synthetic oligonucleotide"
  source 1..20: mol_type = other RNA
atgaagtctaaaccttcagt

SEQ ID NO: 8318 - RNA, 20 nt, synthetic construct
  misc_feature 1..20: note = source = /note="Description of Artificial Sequence: Synthetic oligonucleotide"
  source 1..20: mol_type = other RNA
aaagaatagatgaatgttca

SEQ ID NO: 8319 - RNA, 20 nt, synthetic construct
  misc_feature 1..20: note = source = /note="Description of Artificial Sequence: Synthetic oligonucleotide"
  source 1..20: mol_type = other RNA
ttttttttttttttttgaga

SEQ ID NO: 8320 - RNA, 20 nt, synthetic construct
  misc_feature 1..20: note = source = /note="Description of Artificial Sequence: Synthetic oligonucleotide"
  source 1..20: mol_type = other RNA
gagtttcgctcttgttgccc

SEQ ID NO: 8321 - RNA, 20 nt, synthetic construct
  misc_feature 1..20: note = source = /note="Description of Artificial Sequence: Synthetic oligonucleotide"
  source 1..20: mol_type = other RNA
ttcgctcttgttgcccaggc

SEQ ID NO: 8322 - RNA, 20 nt, synthetic construct
  misc_feature 1..20: note = source = /note="Description of Artificial Sequence: Synthetic oligonucleotide"
  source 1..20: mol_type = other RNA
ttgcccaggctggagtgcaa

SEQ ID NO: 8323 - RNA, 20 nt, synthetic construct
  misc_feature 1..20: note = source = /note="Description of Artificial Sequence: Synthetic oligonucleotide"
  source 1..20: mol_type = other RNA
ggagtgcaatggcgcgatct

SEQ ID NO: 8324 - RNA, 20 nt, synthetic construct
  misc_feature 1..20: note = source = /note="Description of Artificial Sequence: Synthetic oligonucleotide"
  source 1..20: mol_type = other RNA
caccgcgacctccacctccc

SEQ ID NO: 8325 - RNA, 20 nt, synthetic construct
  misc_feature 1..20: note = source = /note="Description of Artificial Sequence: Synthetic oligonucleotide"
  source 1..20: mol_type = other RNA
gcctcagcctccctagtagc

SEQ ID NO: 8326 - RNA, 20 nt, synthetic construct
  misc_feature 1..20: note = source = /note="Description of Artificial Sequence: Synthetic oligonucleotide"
  source 1..20: mol_type = other RNA
cctcagcctccctagtagct

SEQ ID NO: 8327 - RNA, 20 nt, synthetic construct
  misc_feature 1..20: note = source = /note="Description of Artificial Sequence: Synthetic oligonucleotide"
  source 1..20: mol_type = other RNA
tccctagtagctgggattac

SEQ ID NO: 8328 - RNA, 20 nt, synthetic construct
  misc_feature 1..20: note = source = /note="Description of Artificial Sequence: Synthetic oligonucleotide"
  source 1..20: mol_type = other RNA
caggcatgtgccaccacacc

SEQ ID NO: 8329 - RNA, 20 nt, synthetic construct
  misc_feature 1..20: note = source = /note="Description of Artificial Sequence: Synthetic oligonucleotide"
  source 1..20: mol_type = other RNA
tttgtatttttagtagagac

SEQ ID NO: 8330 - RNA, 20 nt, synthetic construct
  misc_feature 1..20: note = source = /note="Description of Artificial Sequence: Synthetic oligonucleotide"
  source 1..20: mol_type = other RNA
ttgtatttttagtagagaca

SEQ ID NO: 8331 - RNA, 20 nt, synthetic construct
  misc_feature 1..20: note = source = /note="Description of Artificial Sequence: Synthetic oligonucleotide"
  source 1..20: mol_type = other RNA
gagacagggtttctccatgt

SEQ ID NO: 8332 - RNA, 20 nt, synthetic construct
  misc_feature 1..20: note = source = /note="Description of Artificial Sequence: Synthetic oligonucleotide"
  source 1..20: mol_type = other RNA
agggtttctccatgttggtc

SEQ ID NO: 8333 - RNA, 20 nt, synthetic construct
  misc_feature 1..20: note = source = /note="Description of Artificial Sequence: Synthetic oligonucleotide"
  source 1..20: mol_type = other RNA
tttctccatgttggtcaggc

SEQ ID NO: 8334 - RNA, 20 nt, synthetic construct
  misc_feature 1..20: note = source = /note="Description of Artificial Sequence: Synthetic oligonucleotide"
  source 1..20: mol_type = other RNA
ggtctcgaactcccgacctc

SEQ ID NO: 8335 - RNA, 20 nt, synthetic construct
  misc_feature 1..20: note = source = /note="Description of Artificial Sequence: Synthetic oligonucleotide"
  source 1..20: mol_type = other RNA
cctcaggtgattgcccacct

SEQ ID NO: 8336 - RNA, 20 nt, synthetic construct
  misc_feature 1..20: note = source = /note="Description of Artificial Sequence: Synthetic oligonucleotide"
  source 1..20: mol_type = other RNA
ggcctcccaaagtgccttac

SEQ ID NO: 8337 - RNA, 20 nt, synthetic construct
  misc_feature 1..20: note = source = /note="Description of Artificial Sequence: Synthetic oligonucleotide"
  source 1..20: mol_type = other RNA
caggcatgagccgccgcgcc

SEQ ID NO: 8338 - RNA, 20 nt, synthetic construct
  misc_feature 1..20: note = source = /note="Description of Artificial Sequence: Synthetic oligonucleotide"
  source 1..20: mol_type = other RNA
caagttattttgcccacgat

SEQ ID NO: 8339 - RNA, 20 nt, synthetic construct
  misc_feature 1..20: note = source = /note="Description of Artificial Sequence: Synthetic oligonucleotide"
  source 1..20: mol_type = other RNA
gtttaaaactctaactagca

SEQ ID NO: 8340 - RNA, 20 nt, synthetic construct
  misc_feature 1..20: note = source = /note="Description of Artificial Sequence: Synthetic oligonucleotide"
  source 1..20: mol_type = other RNA
gttaacacagtttctctctc

SEQ ID NO: 8341 - RNA, 20 nt, synthetic construct
  misc_feature 1..20: note = source = /note="Description of Artificial Sequence: Synthetic oligonucleotide"
  source 1..20: mol_type = other RNA
ttaacacagtttctctctct

SEQ ID NO: 8342 - RNA, 20 nt, synthetic construct
  misc_feature 1..20: note = source = /note="Description of Artificial Sequence: Synthetic oligonucleotide"
  source 1..20: mol_type = other RNA
cagtttctctctctgggttg

SEQ ID NO: 8343 - RNA, 20 nt, synthetic construct
  misc_feature 1..20: note = source = /note="Description of Artificial Sequence: Synthetic oligonucleotide"
  source 1..20: mol_type = other RNA
agtttctctctctgggttgt

SEQ ID NO: 8344 - RNA, 20 nt, synthetic construct
  misc_feature 1..20: note = source = /note="Description of Artificial Sequence: Synthetic oligonucleotide"
  source 1..20: mol_type = other RNA
gtttctctctctgggttgtg

SEQ ID NO: 8345 - RNA, 20 nt, synthetic construct
  misc_feature 1..20: note = source = /note="Description of Artificial Sequence: Synthetic oligonucleotide"
  source 1..20: mol_type = other RNA
attatgatccaaaaatttta

SEQ ID NO: 8346 - RNA, 20 nt, synthetic construct
  misc_feature 1..20: note = source = /note="Description of Artificial Sequence: Synthetic oligonucleotide"
  source 1..20: mol_type = other RNA
cacttttacaaatgattaat

SEQ ID NO: 8347 - RNA, 20 nt, synthetic construct
  misc_feature 1..20: note = source = /note="Description of Artificial Sequence: Synthetic oligonucleotide"
  source 1..20: mol_type = other RNA
tttacaaatgattaattgga

SEQ ID NO: 8348 - RNA, 20 nt, synthetic construct
  misc_feature 1..20: note = source = /note="Description of Artificial Sequence: Synthetic oligonucleotide"
  source 1..20: mol_type = other RNA
tgtaacttataaacttatga

SEQ ID NO: 8349 - RNA, 20 nt, synthetic construct
  misc_feature 1..20: note = source = /note="Description of Artificial Sequence: Synthetic oligonucleotide"
  source 1..20: mol_type = other RNA
agagtttcactctgtcaccc

SEQ ID NO: 8350 - RNA, 20 nt, synthetic construct
  misc_feature 1..20: note = source = /note="Description of Artificial Sequence: Synthetic oligonucleotide"
  source 1..20: mol_type = other RNA
tttcactctgtcacccaggc

SEQ ID NO: 8351 - RNA, 20 nt, synthetic construct
  misc_feature 1..20: note = source = /note="Description of Artificial Sequence: Synthetic oligonucleotide"
  source 1..20: mol_type = other RNA
tcacccaggctggagtgcaa

SEQ ID NO: 8352 - RNA, 20 nt, synthetic construct
  misc_feature 1..20: note = source = /note="Description of Artificial Sequence: Synthetic oligonucleotide"
  source 1..20: mol_type = other RNA
ggagtgcaatggtgcgatct

SEQ ID NO: 8353 - RNA, 20 nt, synthetic construct
  misc_feature 1..20: note = source = /note="Description of Artificial Sequence: Synthetic oligonucleotide"
  source 1..20: mol_type = other RNA
tcactgcaacctccatctcc

SEQ ID NO: 8354 - RNA, 20 nt, synthetic construct
  misc_feature 1..20: note = source = /note="Description of Artificial Sequence: Synthetic oligonucleotide"
  source 1..20: mol_type = other RNA
cactgcaacctccatctcct

SEQ ID NO: 8355 - RNA, 20 nt, synthetic construct
  misc_feature 1..20: note = source = /note="Description of Artificial Sequence: Synthetic oligonucleotide"
  source 1..20: mol_type = other RNA
gcctcagcctcccgaatagc

SEQ ID NO: 8356 - RNA, 20 nt, synthetic construct
  misc_feature 1..20: note = source = /note="Description of Artificial Sequence: Synthetic oligonucleotide"
  source 1..20: mol_type = other RNA
cctcagcctcccgaatagct

SEQ ID NO: 8357 - RNA, 20 nt, synthetic construct
  misc_feature 1..20: note = source = /note="Description of Artificial Sequence: Synthetic oligonucleotide"
  source 1..20: mol_type = other RNA
tcccgaatagctgggattac

SEQ ID NO: 8358 - RNA, 20 nt, synthetic construct
  misc_feature 1..20: note = source = /note="Description of Artificial Sequence: Synthetic oligonucleotide"
  source 1..20: mol_type = other RNA
tttgtatttttagtagagac

SEQ ID NO: 8359 - RNA, 20 nt, synthetic construct
  misc_feature 1..20: note = source = /note="Description of Artificial Sequence: Synthetic oligonucleotide"
  source 1..20: mol_type = other RNA
ttgtatttttagtagagaca

SEQ ID NO: 8360 - RNA, 20 nt, synthetic construct
  misc_feature 1..20: note = source = /note="Description of Artificial Sequence: Synthetic oligonucleotide"
  source 1..20: mol_type = other RNA
agggtttctccatgttgatc

SEQ ID NO: 8361 - RNA, 20 nt, synthetic construct
  misc_feature 1..20: note = source = /note="Description of Artificial Sequence: Synthetic oligonucleotide"
  source 1..20: mol_type = other RNA
tttctccatgttgatcaggc

SEQ ID NO: 8362 - RNA, 20 nt, synthetic construct
  misc_feature 1..20: note = source = /note="Description of Artificial Sequence: Synthetic oligonucleotide"
  source 1..20: mol_type = other RNA
ccatgttgatcaggctggtc

SEQ ID NO: 8363 - RNA, 20 nt, synthetic construct
  misc_feature 1..20: note = source = /note="Description of Artificial Sequence: Synthetic oligonucleotide"
  source 1..20: mol_type = other RNA
tggtctggaactcctgacct

SEQ ID NO: 8364 - RNA, 20 nt, synthetic construct
  misc_feature 1..20: note = source = /note="Description of Artificial Sequence: Synthetic oligonucleotide"
  source 1..20: mol_type = other RNA
ggtctggaactcctgacctc

SEQ ID NO: 8365 - RNA, 20 nt, synthetic construct
  misc_feature 1..20: note = source = /note="Description of Artificial Sequence: Synthetic oligonucleotide"
  source 1..20: mol_type = other RNA
ctcgggtgatccgcccgcct

SEQ ID NO: 8366 - RNA, 20 nt, synthetic construct
  misc_feature 1..20: note = source = /note="Description of Artificial Sequence: Synthetic oligonucleotide"
  source 1..20: mol_type = other RNA
gcctcggcctcccagagtgc

SEQ ID NO: 8367 - RNA, 20 nt, synthetic construct
  misc_feature 1..20: note = source = /note="Description of Artificial Sequence: Synthetic oligonucleotide"
  source 1..20: mol_type = other RNA
cctcggcctcccagagtgct

SEQ ID NO: 8368 - RNA, 20 nt, synthetic construct
  misc_feature 1..20: note = source = /note="Description of Artificial Sequence: Synthetic oligonucleotide"
  source 1..20: mol_type = other RNA
tcccagagtgctgggattac

SEQ ID NO: 8369 - RNA, 20 nt, synthetic construct
  misc_feature 1..20: note = source = /note="Description of Artificial Sequence: Synthetic oligonucleotide"
  source 1..20: mol_type = other RNA
aaatttttaaaaatgtatgt

SEQ ID NO: 8370 - RNA, 20 nt, synthetic construct
  misc_feature 1..20: note = source = /note="Description of Artificial Sequence: Synthetic oligonucleotide"
  source 1..20: mol_type = other RNA
agaaaaaaaattaaaaatta

SEQ ID NO: 8371 - RNA, 20 nt, synthetic construct
  misc_feature 1..20: note = source = /note="Description of Artificial Sequence: Synthetic oligonucleotide"
  source 1..20: mol_type = other RNA
aaggcaacttgtgctcatat

SEQ ID NO: 8372 - RNA, 20 nt, synthetic construct
  misc_feature 1..20: note = source = /note="Description of Artificial Sequence: Synthetic oligonucleotide"
  source 1..20: mol_type = other RNA
ataatatctcttagacttga

SEQ ID NO: 8373 - RNA, 20 nt, synthetic construct
  misc_feature 1..20: note = source = /note="Description of Artificial Sequence: Synthetic oligonucleotide"
  source 1..20: mol_type = other RNA
ttgattttcttgaagtttcc

SEQ ID NO: 8374 - RNA, 20 nt, synthetic construct
  misc_feature 1..20: note = source = /note="Description of Artificial Sequence: Synthetic oligonucleotide"
  source 1..20: mol_type = other RNA
tcaccacaacctccacctcc

SEQ ID NO: 8375 - RNA, 20 nt, synthetic construct
  misc_feature 1..20: note = source = /note="Description of Artificial Sequence: Synthetic oligonucleotide"
  source 1..20: mol_type = other RNA
caccacaacctccacctccc

SEQ ID NO: 8376 - RNA, 20 nt, synthetic construct
  misc_feature 1..20: note = source = /note="Description of Artificial Sequence: Synthetic oligonucleotide"
  source 1..20: mol_type = other RNA
tcccgagtagctagaattac

SEQ ID NO: 8377 - RNA, 20 nt, synthetic construct
  misc_feature 1..20: note = source = /note="Description of Artificial Sequence: Synthetic oligonucleotide"
  source 1..20: mol_type = other RNA
tagaattacaggcacccacc

SEQ ID NO: 8378 - RNA, 20 nt, synthetic construct
  misc_feature 1..20: note = source = /note="Description of Artificial Sequence: Synthetic oligonucleotide"
  source 1..20: mol_type = other RNA
tttgtatttttagtagagac

SEQ ID NO: 8379 - RNA, 20 nt, synthetic construct
  misc_feature 1..20: note = source = /note="Description of Artificial Sequence: Synthetic oligonucleotide"
  source 1..20: mol_type = other RNA
ttgtatttttagtagagaca

SEQ ID NO: 8380 - RNA, 20 nt, synthetic construct
  misc_feature 1..20: note = source = /note="Description of Artificial Sequence: Synthetic oligonucleotide"
  source 1..20: mol_type = other RNA
gagacagggtttcaccatgt

SEQ ID NO: 8381 - RNA, 20 nt, synthetic construct
  misc_feature 1..20: note = source = /note="Description of Artificial Sequence: Synthetic oligonucleotide"
  source 1..20: mol_type = other RNA
ccagattgatctcgaactcc

SEQ ID NO: 8382 - RNA, 20 nt, synthetic construct
  misc_feature 1..20: note = source = /note="Description of Artificial Sequence: Synthetic oligonucleotide"
  source 1..20: mol_type = other RNA
gatctcgaactcctggcttc

SEQ ID NO: 8383 - RNA, 20 nt, synthetic construct
  misc_feature 1..20: note = source = /note="Description of Artificial Sequence: Synthetic oligonucleotide"
  source 1..20: mol_type = other RNA
ttcaggtaacccacccaccc

SEQ ID NO: 8384 - RNA, 20 nt, synthetic construct
  misc_feature 1..20: note = source = /note="Description of Artificial Sequence: Synthetic oligonucleotide"
  source 1..20: mol_type = other RNA
accctggcctcccaaagtgc

SEQ ID NO: 8385 - RNA, 20 nt, synthetic construct
  misc_feature 1..20: note = source = /note="Description of Artificial Sequence: Synthetic oligonucleotide"
  source 1..20: mol_type = other RNA
ccctggcctcccaaagtgct

SEQ ID NO: 8386 - RNA, 20 nt, synthetic construct
  misc_feature 1..20: note = source = /note="Description of Artificial Sequence: Synthetic oligonucleotide"
  source 1..20: mol_type = other RNA
tcccaaagtgctgggattac

SEQ ID NO: 8387 - RNA, 20 nt, synthetic construct
  misc_feature 1..20: note = source = /note="Description of Artificial Sequence: Synthetic oligonucleotide"
  source 1..20: mol_type = other RNA
agtgctgggattacaggtgt

SEQ ID NO: 8388 - RNA, 20 nt, synthetic construct
  misc_feature 1..20: note = source = /note="Description of Artificial Sequence: Synthetic oligonucleotide"
  source 1..20: mol_type = other RNA
ataaatgccaatgcctgaaa

SEQ ID NO: 8389 - RNA, 20 nt, synthetic construct
  misc_feature 1..20: note = source = /note="Description of Artificial Sequence: Synthetic oligonucleotide"
  source 1..20: mol_type = other RNA
tgaaaaccatgaaaaatagt

SEQ ID NO: 8390 - RNA, 20 nt, synthetic construct
  misc_feature 1..20: note = source = /note="Description of Artificial Sequence: Synthetic oligonucleotide"
  source 1..20: mol_type = other RNA
gtttaactgctctaaatgtc

SEQ ID NO: 8391 - RNA, 20 nt, synthetic construct
  misc_feature 1..20: note = source = /note="Description of Artificial Sequence: Synthetic oligonucleotide"
  source 1..20: mol_type = other RNA
ttgctttttgtctagtttca

SEQ ID NO: 8392 - RNA, 20 nt, synthetic construct
  misc_feature 1..20: note = source = /note="Description of Artificial Sequence: Synthetic oligonucleotide"
  source 1..20: mol_type = other RNA
cataaatagattttatttta

SEQ ID NO: 8393 - RNA, 20 nt, synthetic construct
  misc_feature 1..20: note = source = /note="Description of Artificial Sequence: Synthetic oligonucleotide"
  source 1..20: mol_type = other RNA
aatagattttattttatggc

SEQ ID NO: 8394 - RNA, 20 nt, synthetic construct
  misc_feature 1..20: note = source = /note="Description of Artificial Sequence: Synthetic oligonucleotide"
  source 1..20: mol_type = other RNA
agaatagaataatctcaaat

SEQ ID NO: 8395 - RNA, 20 nt, synthetic construct
  misc_feature 1..20: note = source = /note="Description of Artificial Sequence: Synthetic oligonucleotide"
  source 1..20: mol_type = other RNA
gaatagaataatctcaaatt

SEQ ID NO: 8396 - RNA, 20 nt, synthetic construct
  misc_feature 1..20: note = source = /note="Description of Artificial Sequence: Synthetic oligonucleotide"
  source 1..20: mol_type = other RNA
aatagaataatctcaaattg

SEQ ID NO: 8397 - RNA, 20 nt, synthetic construct
  misc_feature 1..20: note = source = /note="Description of Artificial Sequence: Synthetic oligonucleotide"
  source 1..20: mol_type = other RNA
ataatctcaaattggggctg

SEQ ID NO: 8398 - RNA, 20 nt, synthetic construct
  misc_feature 1..20: note = source = /note="Description of Artificial Sequence: Synthetic oligonucleotide"
  source 1..20: mol_type = other RNA
ctctgagtgcatctttcagt

SEQ ID NO: 8399 - RNA, 20 nt, synthetic construct
  misc_feature 1..20: note = source = /note="Description of Artificial Sequence: Synthetic oligonucleotide"
  source 1..20: mol_type = other RNA
aagtctaaccagtatttttt

SEQ ID NO: 8400 - RNA, 20 nt, synthetic construct
  misc_feature 1..20: note = source = /note="Description of Artificial Sequence: Synthetic oligonucleotide"
  source 1..20: mol_type = other RNA
tttttggcaagtaagagttg

SEQ ID NO: 8401 - RNA, 20 nt, synthetic construct
  misc_feature 1..20: note = source = /note="Description of Artificial Sequence: Synthetic oligonucleotide"
  source 1..20: mol_type = other RNA
ttttggcaagtaagagttgt

SEQ ID NO: 8402 - RNA, 20 nt, synthetic construct
  misc_feature 1..20: note = source = /note="Description of Artificial Sequence: Synthetic oligonucleotide"
  source 1..20: mol_type = other RNA
ggagtgtatctgtcatcata

SEQ ID NO: 8403 - RNA, 20 nt, synthetic construct
  misc_feature 1..20: note = source = /note="Description of Artificial Sequence: Synthetic oligonucleotide"
  source 1..20: mol_type = other RNA
gccagaaatgccttctgcca

SEQ ID NO: 8404 - RNA, 20 nt, synthetic construct
  misc_feature 1..20: note = source = /note="Description of Artificial Sequence: Synthetic oligonucleotide"
  source 1..20: mol_type = other RNA
agaaatgccttctgccatgg

SEQ ID NO: 8405 - RNA, 20 nt, synthetic construct
  misc_feature 1..20: note = source = /note="Description of Artificial Sequence: Synthetic oligonucleotide"
  source 1..20: mol_type = other RNA
gaaatgccttctgccatggt

SEQ ID NO: 8406 - RNA, 20 nt, synthetic construct
  misc_feature 1..20: note = source = /note="Description of Artificial Sequence: Synthetic oligonucleotide"
  source 1..20: mol_type = other RNA
gggtgatgttaaacatttca

SEQ ID NO: 8407 - RNA, 20 nt, synthetic construct
  misc_feature 1..20: note = source = /note="Description of Artificial Sequence: Synthetic oligonucleotide"
  source 1..20: mol_type = other RNA
taaaaattgtcaaacataaa

SEQ ID NO: 8408 - RNA, 20 nt, synthetic construct
  misc_feature 1..20: note = source = /note="Description of Artificial Sequence: Synthetic oligonucleotide"
  source 1..20: mol_type = other RNA
gtgcaatataatgaattcca

SEQ ID NO: 8409 - RNA, 20 nt, synthetic construct
  misc_feature 1..20: note = source = /note="Description of Artificial Sequence: Synthetic oligonucleotide"
  source 1..20: mol_type = other RNA
atcttacctgttaacatttc

SEQ ID NO: 8410 - RNA, 20 nt, synthetic construct
  misc_feature 1..20: note = source = /note="Description of Artificial Sequence: Synthetic oligonucleotide"
  source 1..20: mol_type = other RNA
tttcaggatgtatttctaac

SEQ ID NO: 8411 - RNA, 20 nt, synthetic construct
  misc_feature 1..20: note = source = /note="Description of Artificial Sequence: Synthetic oligonucleotide"
  source 1..20: mol_type = other RNA
cccagttcatgtccattgtc

SEQ ID NO: 8412 - RNA, 20 nt, synthetic construct
  misc_feature 1..20: note = source = /note="Description of Artificial Sequence: Synthetic oligonucleotide"
  source 1..20: mol_type = other RNA
ccagttcatgtccattgtct

SEQ ID NO: 8413 - RNA, 20 nt, synthetic construct
  misc_feature 1..20: note = source = /note="Description of Artificial Sequence: Synthetic oligonucleotide"
  source 1..20: mol_type = other RNA
ctgtaaaattccccacattc

SEQ ID NO: 8414 - RNA, 20 nt, synthetic construct
  misc_feature 1..20: note = source = /note="Description of Artificial Sequence: Synthetic oligonucleotide"
  source 1..20: mol_type = other RNA
aattccccacattctggatt

SEQ ID NO: 8415 - RNA, 20 nt, synthetic construct
  misc_feature 1..20: note = source = /note="Description of Artificial Sequence: Synthetic oligonucleotide"
  source 1..20: mol_type = other RNA
ggatttggccgatttcatct

SEQ ID NO: 8416 - RNA, 20 nt, synthetic construct
  misc_feature 1..20: note = source = /note="Description of Artificial Sequence: Synthetic oligonucleotide"
  source 1..20: mol_type = other RNA
tctatccccagtatcttctg

SEQ ID NO: 8417 - RNA, 20 nt, synthetic construct
  misc_feature 1..20: note = source = /note="Description of Artificial Sequence: Synthetic oligonucleotide"
  source 1..20: mol_type = other RNA
ccccagtatcttctgtggac

SEQ ID NO: 8418 - RNA, 20 nt, synthetic construct
  misc_feature 1..20: note = source = /note="Description of Artificial Sequence: Synthetic oligonucleotide"
  source 1..20: mol_type = other RNA
ctgtggactggtagtttgac

SEQ ID NO: 8419 - RNA, 20 nt, synthetic construct
  misc_feature 1..20: note = source = /note="Description of Artificial Sequence: Synthetic oligonucleotide"
  source 1..20: mol_type = other RNA
tttttttttttttttgagac

SEQ ID NO: 8420 - RNA, 20 nt, synthetic construct
  misc_feature 1..20: note = source = /note="Description of Artificial Sequence: Synthetic oligonucleotide"
  source 1..20: mol_type = other RNA
aggctctcgctctgtcgctt

SEQ ID NO: 8421 - RNA, 20 nt, synthetic construct
  misc_feature 1..20: note = source = /note="Description of Artificial Sequence: Synthetic oligonucleotide"
  source 1..20: mol_type = other RNA
tctcgctctgtcgcttaggc

SEQ ID NO: 8422 - RNA, 20 nt, synthetic construct
  misc_feature 1..20: note = source = /note="Description of Artificial Sequence: Synthetic oligonucleotide"
  source 1..20: mol_type = other RNA
tcgcttaggctggagtgcag

SEQ ID NO: 8423 - RNA, 20 nt, synthetic construct
  misc_feature 1..20: note = source = /note="Description of Artificial Sequence: Synthetic oligonucleotide"
  source 1..20: mol_type = other RNA
cactgcaacctccacctccc

SEQ ID NO: 8424 - RNA, 20 nt, synthetic construct
  misc_feature 1..20: note = source = /note="Description of Artificial Sequence: Synthetic oligonucleotide"
  source 1..20: mol_type = other RNA
gcctcagcctcctgagtaac

SEQ ID NO: 8425 - RNA, 20 nt, synthetic construct
  misc_feature 1..20: note = source = /note="Description of Artificial Sequence: Synthetic oligonucleotide"
  source 1..20: mol_type = other RNA
cctcagcctcctgagtaact

SEQ ID NO: 8426 - RNA, 20 nt, synthetic construct
  misc_feature 1..20: note = source = /note="Description of Artificial Sequence: Synthetic oligonucleotide"
  source 1..20: mol_type = other RNA
ttttgtacttttagtagaga

SEQ ID NO: 8427 - RNA, 20 nt, synthetic construct
  misc_feature 1..20: note = source = /note="Description of Artificial Sequence: Synthetic oligonucleotide"
  source 1..20: mol_type = other RNA
tttgtacttttagtagagac

SEQ ID NO: 8428 - RNA, 20 nt, synthetic construct
  misc_feature 1..20: note = source = /note="Description of Artificial Sequence: Synthetic oligonucleotide"
  source 1..20: mol_type = other RNA
ttgtacttttagtagagacg

SEQ ID NO: 8429 - RNA, 20 nt, synthetic construct
  misc_feature 1..20: note = source = /note="Description of Artificial Sequence: Synthetic oligonucleotide"
  source 1..20: mol_type = other RNA
gagacggggtttcgccatgt

SEQ ID NO: 8430 - RNA, 20 nt, synthetic construct
  misc_feature 1..20: note = source = /note="Description of Artificial Sequence: Synthetic oligonucleotide"
  source 1..20: mol_type = other RNA
ggggtttcgccatgttggcc

SEQ ID NO: 8431 - RNA, 20 nt, synthetic construct
  misc_feature 1..20: note = source = /note="Description of Artificial Sequence: Synthetic oligonucleotide"
  source 1..20: mol_type = other RNA
tttcgccatgttggccaggc

SEQ ID NO: 8432 - RNA, 20 nt, synthetic construct
  misc_feature 1..20: note = source = /note="Description of Artificial Sequence: Synthetic oligonucleotide"
  source 1..20: mol_type = other RNA
ccatgttggccaggctggtc

SEQ ID NO: 8433 - RNA, 20 nt, synthetic construct
  misc_feature 1..20: note = source = /note="Description of Artificial Sequence: Synthetic oligonucleotide"
  source 1..20: mol_type = other RNA
ccaggctggtctggaactcc

SEQ ID NO: 8434 - RNA, 20 nt, synthetic construct
  misc_feature 1..20: note = source = /note="Description of Artificial Sequence: Synthetic oligonucleotide"
  source 1..20: mol_type = other RNA
ctcaagtgatccgcccacct

SEQ ID NO: 8435 - RNA, 20 nt, synthetic construct
  misc_feature 1..20: note = source = /note="Description of Artificial Sequence: Synthetic oligonucleotide"
  source 1..20: mol_type = other RNA
accttggcctcccaaagtgc

SEQ ID NO: 8436 - RNA, 20 nt, synthetic construct
  misc_feature 1..20: note = source = /note="Description of Artificial Sequence: Synthetic oligonucleotide"
  source 1..20: mol_type = other RNA
ccttggcctcccaaagtgct

SEQ ID NO: 8437 - RNA, 20 nt, synthetic construct
  misc_feature 1..20: note = source = /note="Description of Artificial Sequence: Synthetic oligonucleotide"
  source 1..20: mol_type = other RNA
tcccaaagtgctgggattac

SEQ ID NO: 8438 - RNA, 20 nt, synthetic construct
  misc_feature 1..20: note = source = /note="Description of Artificial Sequence: Synthetic oligonucleotide"
  source 1..20: mol_type = other RNA
tgtgcatgtatagtatacat

SEQ ID NO: 8439 - RNA, 20 nt, synthetic construct
  misc_feature 1..20: note = source = /note="Description of Artificial Sequence: Synthetic oligonucleotide"
  source 1..20: mol_type = other RNA
tcatcttatttatatacatc

SEQ ID NO: 8440 - RNA, 20 nt, synthetic construct
  misc_feature 1..20: note = source = /note="Description of Artificial Sequence: Synthetic oligonucleotide"
  source 1..20: mol_type = other RNA
aagtccaaatagtaaatcaa

SEQ ID NO: 8441 - RNA, 20 nt, synthetic construct
  misc_feature 1..20: note = source = /note="Description of Artificial Sequence: Synthetic oligonucleotide"
  source 1..20: mol_type = other RNA
acgttttcatcattcccaga

SEQ ID NO: 8442 - RNA, 20 nt, synthetic construct
  misc_feature 1..20: note = source = /note="Description of Artificial Sequence: Synthetic oligonucleotide"
  source 1..20: mol_type = other RNA
aaggaaaccctgtatttatt

SEQ ID NO: 8443 - RNA, 20 nt, synthetic construct
  misc_feature 1..20: note = source = /note="Description of Artificial Sequence: Synthetic oligonucleotide"
  source 1..20: mol_type = other RNA
cccttcttccttcctctaag

SEQ ID NO: 8444 - RNA, 20 nt, synthetic construct
  misc_feature 1..20: note = source = /note="Description of Artificial Sequence: Synthetic oligonucleotide"
  source 1..20: mol_type = other RNA
aaataaacattcagtttctc

SEQ ID NO: 8445 - RNA, 20 nt, synthetic construct
  misc_feature 1..20: note = source = /note="Description of Artificial Sequence: Synthetic oligonucleotide"
  source 1..20: mol_type = other RNA
ttctctggatttacctattc

SEQ ID NO: 8446 - RNA, 20 nt, synthetic construct
  misc_feature 1..20: note = source = /note="Description of Artificial Sequence: Synthetic oligonucleotide"
  source 1..20: mol_type = other RNA
tctctggatttacctattct

SEQ ID NO: 8447 - RNA, 20 nt, synthetic construct
  misc_feature 1..20: note = source = /note="Description of Artificial Sequence: Synthetic oligonucleotide"
  source 1..20: mol_type = other RNA
tattagtgaaatcatgtatt

SEQ ID NO: 8448 - RNA, 20 nt, synthetic construct
  misc_feature 1..20: note = source = /note="Description of Artificial Sequence: Synthetic oligonucleotide"
  source 1..20: mol_type = other RNA
atgtatttggcctttctctc

SEQ ID NO: 8449 - RNA, 20 nt, synthetic construct
  misc_feature 1..20: note = source = /note="Description of Artificial Sequence: Synthetic oligonucleotide"
  source 1..20: mol_type = other RNA
agagtctcgctctgttgccc

SEQ ID NO: 8450 - RNA, 20 nt, synthetic construct
  misc_feature 1..20: note = source = /note="Description of Artificial Sequence: Synthetic oligonucleotide"
  source 1..20: mol_type = other RNA
ctcgctctgttgcccaggct

SEQ ID NO: 8451 - RNA, 20 nt, synthetic construct
  misc_feature 1..20: note = source = /note="Description of Artificial Sequence: Synthetic oligonucleotide"
  source 1..20: mol_type = other RNA
tcgctctgttgcccaggcta

SEQ ID NO: 8452 - RNA, 20 nt, synthetic construct
  misc_feature 1..20: note = source = /note="Description of Artificial Sequence: Synthetic oligonucleotide"
  source 1..20: mol_type = other RNA
ttgcccaggctagggtgcaa

SEQ ID NO: 8453 - RNA, 20 nt, synthetic construct
  misc_feature 1..20: note = source = /note="Description of Artificial Sequence: Synthetic oligonucleotide"
  source 1..20: mol_type = other RNA
tcactgcaacctctgtctcc

SEQ ID NO: 8454 - RNA, 20 nt, synthetic construct
  misc_feature 1..20: note = source = /note="Description of Artificial Sequence: Synthetic oligonucleotide"
  source 1..20: mol_type = other RNA
cactgcaacctctgtctccc

SEQ ID NO: 8455 - RNA, 20 nt, synthetic construct
  misc_feature 1..20: note = source = /note="Description of Artificial Sequence: Synthetic oligonucleotide"
  source 1..20: mol_type = other RNA
tgcctcagcccccaagtagt

SEQ ID NO: 8456 - RNA, 20 nt, synthetic construct
  misc_feature 1..20: note = source = /note="Description of Artificial Sequence: Synthetic oligonucleotide"
  source 1..20: mol_type = other RNA
gcctcagcccccaagtagtt

SEQ ID NO: 8457 - RNA, 20 nt, synthetic construct
  misc_feature 1..20: note = source = /note="Description of Artificial Sequence: Synthetic oligonucleotide"
  source 1..20: mol_type = other RNA
tttgtatttttagtagagac

SEQ ID NO: 8458 - RNA, 20 nt, synthetic construct
  misc_feature 1..20: note = source = /note="Description of Artificial Sequence: Synthetic oligonucleotide"
  source 1..20: mol_type = other RNA
ttgtatttttagtagagaca

SEQ ID NO: 8459 - RNA, 20 nt, synthetic construct
  misc_feature 1..20: note = source = /note="Description of Artificial Sequence: Synthetic oligonucleotide"
  source 1..20: mol_type = other RNA
gagacagggtttcaccatgt

SEQ ID NO: 8460 - RNA, 20 nt, synthetic construct
  misc_feature 1..20: note = source = /note="Description of Artificial Sequence: Synthetic oligonucleotide"
  source 1..20: mol_type = other RNA
agggtttcaccatgttggct

SEQ ID NO: 8461 - RNA, 20 nt, synthetic construct
  misc_feature 1..20: note = source = /note="Description of Artificial Sequence: Synthetic oligonucleotide"
  source 1..20: mol_type = other RNA
tttcaccatgttggctaggc

SEQ ID NO: 8462 - RNA, 20 nt, synthetic construct
  misc_feature 1..20: note = source = /note="Description of Artificial Sequence: Synthetic oligonucleotide"
  source 1..20: mol_type = other RNA
accttagcctcctaaagtgc

SEQ ID NO: 8463 - RNA, 20 nt, synthetic construct
  misc_feature 1..20: note = source = /note="Description of Artificial Sequence: Synthetic oligonucleotide"
  source 1..20: mol_type = other RNA
ccttagcctcctaaagtgct

SEQ ID NO: 8464 - RNA, 20 nt, synthetic construct
  misc_feature 1..20: note = source = /note="Description of Artificial Sequence: Synthetic oligonucleotide"
  source 1..20: mol_type = other RNA
tttattagttaattgacatt

SEQ ID NO: 8465 - RNA, 20 nt, synthetic construct
  misc_feature 1..20: note = source = /note="Description of Artificial Sequence: Synthetic oligonucleotide"
  source 1..20: mol_type = other RNA
tttggatcgtttctactttt

SEQ ID NO: 8466 - RNA, 20 nt, synthetic construct
  misc_feature 1..20: note = source = /note="Description of Artificial Sequence: Synthetic oligonucleotide"
  source 1..20: mol_type = other RNA
aattatgctgcaatgaacat

SEQ ID NO: 8467 - RNA, 20 nt, synthetic construct
  misc_feature 1..20: note = source = /note="Description of Artificial Sequence: Synthetic oligonucleotide"
  source 1..20: mol_type = other RNA
gaacatgttttcagttacct

SEQ ID NO: 8468 - RNA, 20 nt, synthetic construct
  misc_feature 1..20: note = source = /note="Description of Artificial Sequence: Synthetic oligonucleotide"
  source 1..20: mol_type = other RNA
aacatgttttcagttacctt

SEQ ID NO: 8469 - RNA, 20 nt, synthetic construct
  misc_feature 1..20: note = source = /note="Description of Artificial Sequence: Synthetic oligonucleotide"
  source 1..20: mol_type = other RNA
ttaccttgggatatacacct

SEQ ID NO: 8470 - RNA, 20 nt, synthetic construct
  misc_feature 1..20: note = source = /note="Description of Artificial Sequence: Synthetic oligonucleotide"
  source 1..20: mol_type = other RNA
gagtgacattgttagtaata

SEQ ID NO: 8471 - RNA, 20 nt, synthetic construct
  misc_feature 1..20: note = source = /note="Description of Artificial Sequence: Synthetic oligonucleotide"
  source 1..20: mol_type = other RNA
tttctgccaacaatgtatga

SEQ ID NO: 8472 - RNA, 20 nt, synthetic construct
  misc_feature 1..20: note = source = /note="Description of Artificial Sequence: Synthetic oligonucleotide"
  source 1..20: mol_type = other RNA
tttaattgtaaccatccaag

SEQ ID NO: 8473 - RNA, 20 nt, synthetic construct
  misc_feature 1..20: note = source = /note="Description of Artificial Sequence: Synthetic oligonucleotide"
  source 1..20: mol_type = other RNA
ttaattgtaaccatccaagt

SEQ ID NO: 8474 - RNA, 20 nt, synthetic construct
  misc_feature 1..20: note = source = /note="Description of Artificial Sequence: Synthetic oligonucleotide"
  source 1..20: mol_type = other RNA
tttgatttgcattttcctaa

SEQ ID NO: 8475 - RNA, 20 nt, synthetic construct
  misc_feature 1..20: note = source = /note="Description of Artificial Sequence: Synthetic oligonucleotide"
  source 1..20: mol_type = other RNA
attttcctaatggctgatat

SEQ ID NO: 8476 - RNA, 20 nt, synthetic construct
  misc_feature 1..20: note = source = /note="Description of Artificial Sequence: Synthetic oligonucleotide"
  source 1..20: mol_type = other RNA
ttttcctaatggctgatatt

SEQ ID NO: 8477 - RNA, 20 nt, synthetic construct
  misc_feature 1..20: note = source = /note="Description of Artificial Sequence: Synthetic oligonucleotide"
  source 1..20: mol_type = other RNA
cttgaactttgtcaaatgcc

SEQ ID NO: 8478 - RNA, 20 nt, synthetic construct
  misc_feature 1..20: note = source = /note="Description of Artificial Sequence: Synthetic oligonucleotide"
  source 1..20: mol_type = other RNA
gatattttctcctatcccac

SEQ ID NO: 8479 - RNA, 20 nt, synthetic construct
  misc_feature 1..20: note = source = /note="Description of Artificial Sequence: Synthetic oligonucleotide"
  source 1..20: mol_type = other RNA
aaactcaatttctttttaat

SEQ ID NO: 8480 - RNA, 20 nt, synthetic construct
  misc_feature 1..20: note = source = /note="Description of Artificial Sequence: Synthetic oligonucleotide"
  source 1..20: mol_type = other RNA
taattggcagcttgtgcatt

SEQ ID NO: 8481 - RNA, 20 nt, synthetic construct
  misc_feature 1..20: note = source = /note="Description of Artificial Sequence: Synthetic oligonucleotide"
  source 1..20: mol_type = other RNA
aattggcagcttgtgcattt

SEQ ID NO: 8482 - RNA, 20 nt, synthetic construct
  misc_feature 1..20: note = source = /note="Description of Artificial Sequence: Synthetic oligonucleotide"
  source 1..20: mol_type = other RNA
attggcagcttgtgcatttg

SEQ ID NO: 8483 - RNA, 20 nt, synthetic construct
  misc_feature 1..20: note = source = /note="Description of Artificial Sequence: Synthetic oligonucleotide"
  source 1..20: mol_type = other RNA
ttaatgttgagttaatttga

SEQ ID NO: 8484 - RNA, 20 nt, synthetic construct
  misc_feature 1..20: note = source = /note="Description of Artificial Sequence: Synthetic oligonucleotide"
  source 1..20: mol_type = other RNA
aattaactgaccaagatgta

SEQ ID NO: 8485 - RNA, 20 nt, synthetic construct
  misc_feature 1..20: note = source = /note="Description of Artificial Sequence: Synthetic oligonucleotide"
  source 1..20: mol_type = other RNA
attaactgaccaagatgtat

SEQ ID NO: 8486 - RNA, 20 nt, synthetic construct
  misc_feature 1..20: note = source = /note="Description of Artificial Sequence: Synthetic oligonucleotide"
  source 1..20: mol_type = other RNA
aagatgtatgggtttatttc

SEQ ID NO: 8487 - RNA, 20 nt, synthetic construct
  misc_feature 1..20: note = source = /note="Description of Artificial Sequence: Synthetic oligonucleotide"
  source 1..20: mol_type = other RNA
gtaaattttgaaatcaagac

SEQ ID NO: 8488 - RNA, 20 nt, synthetic construct
  misc_feature 1..20: note = source = /note="Description of Artificial Sequence: Synthetic oligonucleotide"
  source 1..20: mol_type = other RNA
cttttgcctaccatgtttct

SEQ ID NO: 8489 - RNA, 20 nt, synthetic construct
  misc_feature 1..20: note = source = /note="Description of Artificial Sequence: Synthetic oligonucleotide"
  source 1..20: mol_type = other RNA
ttttgcctaccatgtttctt

SEQ ID NO: 8490 - RNA, 20 nt, synthetic construct
  misc_feature 1..20: note = source = /note="Description of Artificial Sequence: Synthetic oligonucleotide"
  source 1..20: mol_type = other RNA
cagcttctccgtttcctttc

SEQ ID NO: 8491 - RNA, 20 nt, synthetic construct
  misc_feature 1..20: note = source = /note="Description of Artificial Sequence: Synthetic oligonucleotide"
  source 1..20: mol_type = other RNA
tttttttttttttttttttt

SEQ ID NO: 8492 - RNA, 20 nt, synthetic construct
  misc_feature 1..20: note = source = /note="Description of Artificial Sequence: Synthetic oligonucleotide"
  source 1..20: mol_type = other RNA
ttttttttttttttttttgg

SEQ ID NO: 8493 - RNA, 20 nt, synthetic construct
  misc_feature 1..20: note = source = /note="Description of Artificial Sequence: Synthetic oligonucleotide"
  source 1..20: mol_type = other RNA
ttttttttttttggtggagc

SEQ ID NO: 8494 - RNA, 20 nt, synthetic construct
  misc_feature 1..20: note = source = /note="Description of Artificial Sequence: Synthetic oligonucleotide"
  source 1..20: mol_type = other RNA
tcttactatattacccaagc

SEQ ID NO: 8495 - RNA, 20 nt, synthetic construct
  misc_feature 1..20: note = source = /note="Description of Artificial Sequence: Synthetic oligonucleotide"
  source 1..20: mol_type = other RNA
ccaagctggttttgaactcc

SEQ ID NO: 8496 - RNA, 20 nt, synthetic construct
  misc_feature 1..20: note = source = /note="Description of Artificial Sequence: Synthetic oligonucleotide"
  source 1..20: mol_type = other RNA
ctaaagagatcctccctcct

SEQ ID NO: 8497 - RNA, 20 nt, synthetic construct
  misc_feature 1..20: note = source = /note="Description of Artificial Sequence: Synthetic oligonucleotide"
  source 1..20: mol_type = other RNA
tcctaggcttcccagagagc

SEQ ID NO: 8498 - RNA, 20 nt, synthetic construct
  misc_feature 1..20: note = source = /note="Description of Artificial Sequence: Synthetic oligonucleotide"
  source 1..20: mol_type = other RNA
cctaggcttcccagagagct

SEQ ID NO: 8499 - RNA, 20 nt, synthetic construct
  misc_feature 1..20: note = source = /note="Description of Artificial Sequence: Synthetic oligonucleotide"
  source 1..20: mol_type = other RNA
ctaggcttcccagagagctg

SEQ ID NO: 8500 - RNA, 20 nt, synthetic construct
  misc_feature 1..20: note = source = /note="Description of Artificial Sequence: Synthetic oligonucleotide"
  source 1..20: mol_type = other RNA
tcccagagagctggggttac

SEQ ID NO: 8501 - RNA, 20 nt, synthetic construct
  misc_feature 1..20: note = source = /note="Description of Artificial Sequence: Synthetic oligonucleotide"
  source 1..20: mol_type = other RNA
caccacatccaacccccttc

SEQ ID NO: 8502 - RNA, 20 nt, synthetic construct
  misc_feature 1..20: note = source = /note="Description of Artificial Sequence: Synthetic oligonucleotide"
  source 1..20: mol_type = other RNA
accacatccaacccccttct

SEQ ID NO: 8503 - RNA, 20 nt, synthetic construct
  misc_feature 1..20: note = source = /note="Description of Artificial Sequence: Synthetic oligonucleotide"
  source 1..20: mol_type = other RNA
cccccttctgggactttgac

SEQ ID NO: 8504 - RNA, 20 nt, synthetic construct
  misc_feature 1..20: note = source = /note="Description of Artificial Sequence: Synthetic oligonucleotide"
  source 1..20: mol_type = other RNA
ccccttctgggactttgact

SEQ ID NO: 8505 - RNA, 20 nt, synthetic construct
  misc_feature 1..20: note = source = /note="Description of Artificial Sequence: Synthetic oligonucleotide"
  source 1..20: mol_type = other RNA
cccttctgggactttgactg

SEQ ID NO: 8506 - RNA, 20 nt, synthetic construct
  misc_feature 1..20: note = source = /note="Description of Artificial Sequence: Synthetic oligonucleotide"
  source 1..20: mol_type = other RNA
tggggttctgttgaatctgt

SEQ ID NO: 8507 - RNA, 20 nt, synthetic construct
  misc_feature 1..20: note = source = /note="Description of Artificial Sequence: Synthetic oligonucleotide"
  source 1..20: mol_type = other RNA
gttgaatctgttggtcaatt

SEQ ID NO: 8508 - RNA, 20 nt, synthetic construct
  misc_feature 1..20: note = source = /note="Description of Artificial Sequence: Synthetic oligonucleotide"
  source 1..20: mol_type = other RNA
agcttccaatttatgaacac

SEQ ID NO: 8509 - RNA, 20 nt, synthetic construct
  misc_feature 1..20: note = source = /note="Description of Artificial Sequence: Synthetic oligonucleotide"
  source 1..20: mol_type = other RNA
aatttctttcagtaatgttt

SEQ ID NO: 8510 - RNA, 20 nt, synthetic construct
  misc_feature 1..20: note = source = /note="Description of Artificial Sequence: Synthetic oligonucleotide"
  source 1..20: mol_type = other RNA
ctcactgcaacctccacctc

SEQ ID NO: 8511 - RNA, 20 nt, synthetic construct
  misc_feature 1..20: note = source = /note="Description of Artificial Sequence: Synthetic oligonucleotide"
  source 1..20: mol_type = other RNA
tcactgcaacctccacctcc

SEQ ID NO: 8512 - RNA, 20 nt, synthetic construct
  misc_feature 1..20: note = source = /note="Description of Artificial Sequence: Synthetic oligonucleotide"
  source 1..20: mol_type = other RNA
agtgattctcctgcctcagc

SEQ ID NO: 8513 - RNA, 20 nt, synthetic construct
  misc_feature 1..20: note = source = /note="Description of Artificial Sequence: Synthetic oligonucleotide"
  source 1..20: mol_type = other RNA
cctgcctcagctggaactac

SEQ ID NO: 8514 - RNA, 20 nt, synthetic construct
  misc_feature 1..20: note = source = /note="Description of Artificial Sequence: Synthetic oligonucleotide"
  source 1..20: mol_type = other RNA
caggtgcgcgccaccatgcc

SEQ ID NO: 8515 - RNA, 20 nt, synthetic construct
  misc_feature 1..20: note = source = /note="Description of Artificial Sequence: Synthetic oligonucleotide"
  source 1..20: mol_type = other RNA
ggctaattgttttgtgtttt

SEQ ID NO: 8516 - RNA, 20 nt, synthetic construct
  misc_feature 1..20: note = source = /note="Description of Artificial Sequence: Synthetic oligonucleotide"
  source 1..20: mol_type = other RNA
taattgttttgtgtttttgg

SEQ ID NO: 8517 - RNA, 20 nt, synthetic construct
  misc_feature 1..20: note = source = /note="Description of Artificial Sequence: Synthetic oligonucleotide"
  source 1..20: mol_type = other RNA
tttgtgtttttggtggagac

SEQ ID NO: 8518 - RNA, 20 nt, synthetic construct
  misc_feature 1..20: note = source = /note="Description of Artificial Sequence: Synthetic oligonucleotide"
  source 1..20: mol_type = other RNA
ttgtgtttttggtggagaca

SEQ ID NO: 8519 - RNA, 20 nt, synthetic construct
  misc_feature 1..20: note = source = /note="Description of Artificial Sequence: Synthetic oligonucleotide"
  source 1..20: mol_type = other RNA
gagacagggtttcaccatgt

SEQ ID NO: 8520 - RNA, 20 nt, synthetic construct
  misc_feature 1..20: note = source = /note="Description of Artificial Sequence: Synthetic oligonucleotide"
  source 1..20: mol_type = other RNA
agggtttcaccatgttggcc

SEQ ID NO: 8521 - RNA, 20 nt, synthetic construct
  misc_feature 1..20: note = source = /note="Description of Artificial Sequence: Synthetic oligonucleotide"
  source 1..20: mol_type = other RNA
tttcaccatgttggccaggc

SEQ ID NO: 8522 - RNA, 20 nt, synthetic construct
  misc_feature 1..20: note = source = /note="Description of Artificial Sequence: Synthetic oligonucleotide"
  source 1..20: mol_type = other RNA
ccaggctggtctcaaacacc

SEQ ID NO: 8523 - RNA, 20 nt, synthetic construct
  misc_feature 1..20: note = source = /note="Description of Artificial Sequence: Synthetic oligonucleotide"
  source 1..20: mol_type = other RNA
ctcaagtgacctgactgcct

SEQ ID NO: 8524 - RNA, 20 nt, synthetic construct
  misc_feature 1..20: note = source = /note="Description of Artificial Sequence: Synthetic oligonucleotide"
  source 1..20: mol_type = other RNA
gccttggcctcccaaagtac

SEQ ID NO: 8525 - RNA, 20 nt, synthetic construct
  misc_feature 1..20: note = source = /note="Description of Artificial Sequence: Synthetic oligonucleotide"
  source 1..20: mol_type = other RNA
ccttggcctcccaaagtact

SEQ ID NO: 8526 - RNA, 20 nt, synthetic construct
  misc_feature 1..20: note = source = /note="Description of Artificial Sequence: Synthetic oligonucleotide"
  source 1..20: mol_type = other RNA
tcccaaagtactgggattac

SEQ ID NO: 8527 - RNA, 20 nt, synthetic construct
  misc_feature 1..20: note = source = /note="Description of Artificial Sequence: Synthetic oligonucleotide"
  source 1..20: mol_type = other RNA
caggcatgagccaccacgcc

SEQ ID NO: 8528 - RNA, 20 nt, synthetic construct
  misc_feature 1..20: note = source = /note="Description of Artificial Sequence: Synthetic oligonucleotide"
  source 1..20: mol_type = other RNA
aattttttgttgataatata

SEQ ID NO: 8529 - RNA, 20 nt, synthetic construct
  misc_feature 1..20: note = source = /note="Description of Artificial Sequence: Synthetic oligonucleotide"
  source 1..20: mol_type = other RNA
taaatttcatttttatatat

SEQ ID NO: 8530 - RNA, 20 nt, synthetic construct
  misc_feature 1..20: note = source = /note="Description of Artificial Sequence: Synthetic oligonucleotide"
  source 1..20: mol_type = other RNA
ttattagcactaactttttt

SEQ ID NO: 8531 - RNA, 20 nt, synthetic construct
  misc_feature 1..20: note = source = /note="Description of Artificial Sequence: Synthetic oligonucleotide"
  source 1..20: mol_type = other RNA
ctttttttggtagattcctt

SEQ ID NO: 8532 - RNA, 20 nt, synthetic construct
  misc_feature 1..20: note = source = /note="Description of Artificial Sequence: Synthetic oligonucleotide"
  source 1..20: mol_type = other RNA
ttgtttcttcacttccaatc

SEQ ID NO: 8533 - RNA, 20 nt, synthetic construct
  misc_feature 1..20: note = source = /note="Description of Artificial Sequence: Synthetic oligonucleotide"
  source 1..20: mol_type = other RNA
tgtttcttcacttccaatct

SEQ ID NO: 8534 - RNA, 20 nt, synthetic construct
  misc_feature 1..20: note = source = /note="Description of Artificial Sequence: Synthetic oligonucleotide"
  source 1..20: mol_type = other RNA
ttcttcacttccaatctggg

SEQ ID NO: 8535 - RNA, 20 nt, synthetic construct
  misc_feature 1..20: note = source = /note="Description of Artificial Sequence: Synthetic oligonucleotide"
  source 1..20: mol_type = other RNA
tagaacttccagaaaatgtc

SEQ ID NO: 8536 - RNA, 20 nt, synthetic construct
  misc_feature 1..20: note = source = /note="Description of Artificial Sequence: Synthetic oligonucleotide"
  source 1..20: mol_type = other RNA
ttaagtatgatactagttgt

SEQ ID NO: 8537 - RNA, 20 nt, synthetic construct
  misc_feature 1..20: note = source = /note="Description of Artificial Sequence: Synthetic oligonucleotide"
  source 1..20: mol_type = other RNA
ttgaataattttatcacgaa

SEQ ID NO: 8538 - RNA, 20 nt, synthetic construct
  misc_feature 1..20: note = source = /note="Description of Artificial Sequence: Synthetic oligonucleotide"
  source 1..20: mol_type = other RNA
tgaataattttatcacgaaa

SEQ ID NO: 8539 - RNA, 20 nt, synthetic construct
  misc_feature 1..20: note = source = /note="Description of Artificial Sequence: Synthetic oligonucleotide"
  source 1..20: mol_type = other RNA
tgaacttttctcaaatgctg

SEQ ID NO: 8540 - RNA, 20 nt, synthetic construct
  misc_feature 1..20: note = source = /note="Description of Artificial Sequence: Synthetic oligonucleotide"
  source 1..20: mol_type = other RNA
tctcctttattctattaata

SEQ ID NO: 8541 - RNA, 20 nt, synthetic construct
  misc_feature 1..20: note = source = /note="Description of Artificial Sequence: Synthetic oligonucleotide"
  source 1..20: mol_type = other RNA
ttagattaacattatatttc

SEQ ID NO: 8542 - RNA, 20 nt, synthetic construct
  misc_feature 1..20: note = source = /note="Description of Artificial Sequence: Synthetic oligonucleotide"
  source 1..20: mol_type = other RNA
tttctggaataaatcccact

SEQ ID NO: 8543 - RNA, 20 nt, synthetic construct
  misc_feature 1..20: note = source = /note="Description of Artificial Sequence: Synthetic oligonucleotide"
  source 1..20: mol_type = other RNA
tattactttttatatattgc

SEQ ID NO: 8544 - RNA, 20 nt, synthetic construct
  misc_feature 1..20: note = source = /note="Description of Artificial Sequence: Synthetic oligonucleotide"
  source 1..20: mol_type = other RNA
tattgctggagtctgtttgc

SEQ ID NO: 8545 - RNA, 20 nt, synthetic construct
  misc_feature 1..20: note = source = /note="Description of Artificial Sequence: Synthetic oligonucleotide"
  source 1..20: mol_type = other RNA
tgtttgcaggtatttcattg

SEQ ID NO: 8546 - RNA, 20 nt, synthetic construct
  misc_feature 1..20: note = source = /note="Description of Artificial Sequence: Synthetic oligonucleotide"
  source 1..20: mol_type = other RNA
ctttcgcatctctgttgata

SEQ ID NO: 8547 - RNA, 20 nt, synthetic construct
  misc_feature 1..20: note = source = /note="Description of Artificial Sequence: Synthetic oligonucleotide"
  source 1..20: mol_type = other RNA
tagttctcttgtgatatctt

SEQ ID NO: 8548 - RNA, 20 nt, synthetic construct
  misc_feature 1..20: note = source = /note="Description of Artificial Sequence: Synthetic oligonucleotide"
  source 1..20: mol_type = other RNA
tcttgtgatatctttggttt

SEQ ID NO: 8549 - RNA, 20 nt, synthetic construct
  misc_feature 1..20: note = source = /note="Description of Artificial Sequence: Synthetic oligonucleotide"
  source 1..20: mol_type = other RNA
tctgagttcacaaaatgcat

SEQ ID NO: 8550 - RNA, 20 nt, synthetic construct
  misc_feature 1..20: note = source = /note="Description of Artificial Sequence: Synthetic oligonucleotide"
  source 1..20: mol_type = other RNA
ctgagttcacaaaatgcatt

SEQ ID NO: 8551 - RNA, 20 nt, synthetic construct
  misc_feature 1..20: note = source = /note="Description of Artificial Sequence: Synthetic oligonucleotide"
  source 1..20: mol_type = other RNA
atgttcccttctctatcttt

SEQ ID NO: 8552 - RNA, 20 nt, synthetic construct
  misc_feature 1..20: note = source = /note="Description of Artificial Sequence: Synthetic oligonucleotide"
  source 1..20: mol_type = other RNA
tcttttggaagagtttacaa

SEQ ID NO: 8553 - RNA, 20 nt, synthetic construct
  misc_feature 1..20: note = source = /note="Description of Artificial Sequence: Synthetic oligonucleotide"
  source 1..20: mol_type = other RNA
tggaagagtttacaaaggat

SEQ ID NO: 8554 - RNA, 20 nt, synthetic construct
  misc_feature 1..20: note = source = /note="Description of Artificial Sequence: Synthetic oligonucleotide"
  source 1..20: mol_type = other RNA
aactcttttttaaatgtttg

SEQ ID NO: 8555 - RNA, 20 nt, synthetic construct
  misc_feature 1..20: note = source = /note="Description of Artificial Sequence: Synthetic oligonucleotide"
  source 1..20: mol_type = other RNA
ttgaggaaattctctacccc

SEQ ID NO: 8556 - RNA, 20 nt, synthetic construct
  misc_feature 1..20: note = source = /note="Description of Artificial Sequence: Synthetic oligonucleotide"
  source 1..20: mol_type = other RNA
tgaggaaattctctacccct

SEQ ID NO: 8557 - RNA, 20 nt, synthetic construct
  misc_feature 1..20: note = source = /note="Description of Artificial Sequence: Synthetic oligonucleotide"
  source 1..20: mol_type = other RNA
tacccctgggctttcctttg

SEQ ID NO: 8558 - RNA, 20 nt, synthetic construct
  misc_feature 1..20: note = source = /note="Description of Artificial Sequence: Synthetic oligonucleotide"
  source 1..20: mol_type = other RNA
acccctgggctttcctttgt

SEQ ID NO: 8559 - RNA, 20 nt, synthetic construct
  misc_feature 1..20: note = source = /note="Description of Artificial Sequence: Synthetic oligonucleotide"
  source 1..20: mol_type = other RNA
attatttttaaagcaatttt

SEQ ID NO: 8560 - RNA, 20 nt, synthetic construct
  misc_feature 1..20: note = source = /note="Description of Artificial Sequence: Synthetic oligonucleotide"
  source 1..20: mol_type = other RNA
ttatttttaaagcaatttta

SEQ ID NO: 8561 - RNA, 20 nt, synthetic construct
  misc_feature 1..20: note = source = /note="Description of Artificial Sequence: Synthetic oligonucleotide"
  source 1..20: mol_type = other RNA
gtaaaagcacattgaatgaa

SEQ ID NO: 8562 - RNA, 20 nt, synthetic construct
  misc_feature 1..20: note = source = /note="Description of Artificial Sequence: Synthetic oligonucleotide"
  source 1..20: mol_type = other RNA
atcaacatcctttaccagaa

SEQ ID NO: 8563 - RNA, 20 nt, synthetic construct
  misc_feature 1..20: note = source = /note="Description of Artificial Sequence: Synthetic oligonucleotide"
  source 1..20: mol_type = other RNA
catagtttagagttcacctt

SEQ ID NO: 8564 - RNA, 20 nt, synthetic construct
  misc_feature 1..20: note = source = /note="Description of Artificial Sequence: Synthetic oligonucleotide"
  source 1..20: mol_type = other RNA
tgttatgtattctgtgagtc

SEQ ID NO: 8565 - RNA, 20 nt, synthetic construct
  misc_feature 1..20: note = source = /note="Description of Artificial Sequence: Synthetic oligonucleotide"
  source 1..20: mol_type = other RNA
attccagaatgtcatatagt

SEQ ID NO: 8566 - RNA, 20 nt, synthetic construct
  misc_feature 1..20: note = source = /note="Description of Artificial Sequence: Synthetic oligonucleotide"
  source 1..20: mol_type = other RNA
agttggaatgatacagtata

SEQ ID NO: 8567 - RNA, 20 nt, synthetic construct
  misc_feature 1..20: note = source = /note="Description of Artificial Sequence: Synthetic oligonucleotide"
  source 1..20: mol_type = other RNA
tatatggagccttttcagac

SEQ ID NO: 8568 - RNA, 20 nt, synthetic construct
  misc_feature 1..20: note = source = /note="Description of Artificial Sequence: Synthetic oligonucleotide"
  source 1..20: mol_type = other RNA
ttgaataatattccattgtc

SEQ ID NO: 8569 - RNA, 20 nt, synthetic construct
  misc_feature 1..20: note = source = /note="Description of Artificial Sequence: Synthetic oligonucleotide"
  source 1..20: mol_type = other RNA
aagctgttataaaagtatgt

SEQ ID NO: 8570 - RNA, 20 nt, synthetic construct
  misc_feature 1..20: note = source = /note="Description of Artificial Sequence: Synthetic oligonucleotide"
  source 1..20: mol_type = other RNA
aaagtatgtaggtttttgtg

SEQ ID NO: 8571 - RNA, 20 nt, synthetic construct
  misc_feature 1..20: note = source = /note="Description of Artificial Sequence: Synthetic oligonucleotide"
  source 1..20: mol_type = other RNA
ttttaattttaatgaagtct

SEQ ID NO: 8572 - RNA, 20 nt, synthetic construct
  misc_feature 1..20: note = source = /note="Description of Artificial Sequence: Synthetic oligonucleotide"
  source 1..20: mol_type = other RNA
taattcatgaataatgtttt

SEQ ID NO: 8573 - RNA, 20 nt, synthetic construct
  misc_feature 1..20: note = source = /note="Description of Artificial Sequence: Synthetic oligonucleotide"
  source 1..20: mol_type = other RNA
tatctaaaaagtcaacacca

SEQ ID NO: 8574 - RNA, 20 nt, synthetic construct
  misc_feature 1..20: note = source = /note="Description of Artificial Sequence: Synthetic oligonucleotide"
  source 1..20: mol_type = other RNA
tagttctgcattttacattt

SEQ ID NO: 8575 - RNA, 20 nt, synthetic construct
  misc_feature 1..20: note = source = /note="Description of Artificial Sequence: Synthetic oligonucleotide"
  source 1..20: mol_type = other RNA
agttctgcattttacattta

SEQ ID NO: 8576 - RNA, 20 nt, synthetic construct
  misc_feature 1..20: note = source = /note="Description of Artificial Sequence: Synthetic oligonucleotide"
  source 1..20: mol_type = other RNA
tagattcacttgtttgcatg

SEQ ID NO: 8577 - RNA, 20 nt, synthetic construct
  misc_feature 1..20: note = source = /note="Description of Artificial Sequence: Synthetic oligonucleotide"
  source 1..20: mol_type = other RNA
atcagttgattataattaag

SEQ ID NO: 8578 - RNA, 20 nt, synthetic construct
  misc_feature 1..20: note = source = /note="Description of Artificial Sequence: Synthetic oligonucleotide"
  source 1..20: mol_type = other RNA
ataattaagtggtctgtttc

SEQ ID NO: 8579 - RNA, 20 nt, synthetic construct
  misc_feature 1..20: note = source = /note="Description of Artificial Sequence: Synthetic oligonucleotide"
  source 1..20: mol_type = other RNA
ccacactatcttgttaactt

SEQ ID NO: 8580 - RNA, 20 nt, synthetic construct
  misc_feature 1..20: note = source = /note="Description of Artificial Sequence: Synthetic oligonucleotide"
  source 1..20: mol_type = other RNA
tttctccttcagtattgagt

SEQ ID NO: 8581 - RNA, 20 nt, synthetic construct
  misc_feature 1..20: note = source = /note="Description of Artificial Sequence: Synthetic oligonucleotide"
  source 1..20: mol_type = other RNA
gtaaaaaaagcagtctgaaa

SEQ ID NO: 8582 - RNA, 20 nt, synthetic construct
  misc_feature 1..20: note = source = /note="Description of Artificial Sequence: Synthetic oligonucleotide"
  source 1..20: mol_type = other RNA
ctatatatacagtcatttat

SEQ ID NO: 8583 - RNA, 20 nt, synthetic construct
  misc_feature 1..20: note = source = /note="Description of Artificial Sequence: Synthetic oligonucleotide"
  source 1..20: mol_type = other RNA
cagtatcctcaaaatcttgc

SEQ ID NO: 8584 - RNA, 20 nt, synthetic construct
  misc_feature 1..20: note = source = /note="Description of Artificial Sequence: Synthetic oligonucleotide"
  source 1..20: mol_type = other RNA
catcttcctatccatgaaca

SEQ ID NO: 8585 - RNA, 20 nt, synthetic construct
  misc_feature 1..20: note = source = /note="Description of Artificial Sequence: Synthetic oligonucleotide"
  source 1..20: mol_type = other RNA
aacatggaacatctctttct

SEQ ID NO: 8586 - RNA, 20 nt, synthetic construct
  misc_feature 1..20: note = source = /note="Description of Artificial Sequence: Synthetic oligonucleotide"
  source 1..20: mol_type = other RNA
ttatacataaatatttcatt

SEQ ID NO: 8587 - RNA, 20 nt, synthetic construct
  misc_feature 1..20: note = source = /note="Description of Artificial Sequence: Synthetic oligonucleotide"
  source 1..20: mol_type = other RNA
tatacataaatatttcattt

SEQ ID NO: 8588 - RNA, 20 nt, synthetic construct
  misc_feature 1..20: note = source = /note="Description of Artificial Sequence: Synthetic oligonucleotide"
  source 1..20: mol_type = other RNA
atacataaatatttcatttg

SEQ ID NO: 8589 - RNA, 20 nt, synthetic construct
  misc_feature 1..20: note = source = /note="Description of Artificial Sequence: Synthetic oligonucleotide"
  source 1..20: mol_type = other RNA
tacataaatatttcatttgg

SEQ ID NO: 8590 - RNA, 20 nt, synthetic construct
  misc_feature 1..20: note = source = /note="Description of Artificial Sequence: Synthetic oligonucleotide"
  source 1..20: mol_type = other RNA
acataaatatttcatttggg

SEQ ID NO: 8591 - RNA, 20 nt, synthetic construct
  misc_feature 1..20: note = source = /note="Description of Artificial Sequence: Synthetic oligonucleotide"
  source 1..20: mol_type = other RNA
cataaatatttcatttgggg

SEQ ID NO: 8592 - RNA, 20 nt, synthetic construct
  misc_feature 1..20: note = source = /note="Description of Artificial Sequence: Synthetic oligonucleotide"
  source 1..20: mol_type = other RNA
ttcatttgggggggtgctaa

SEQ ID NO: 8593 - RNA, 20 nt, synthetic construct
  misc_feature 1..20: note = source = /note="Description of Artificial Sequence: Synthetic oligonucleotide"
  source 1..20: mol_type = other RNA
agattctgcttgtacattgc

SEQ ID NO: 8594 - RNA, 20 nt, synthetic construct
  misc_feature 1..20: note = source = /note="Description of Artificial Sequence: Synthetic oligonucleotide"
  source 1..20: mol_type = other RNA
agatccagtttttttttttt

SEQ ID NO: 8595 - RNA, 20 nt, synthetic construct
  misc_feature 1..20: note = source = /note="Description of Artificial Sequence: Synthetic oligonucleotide"
  source 1..20: mol_type = other RNA
gtcattctttcatattttct

SEQ ID NO: 8596 - RNA, 20 nt, synthetic construct
  misc_feature 1..20: note = source = /note="Description of Artificial Sequence: Synthetic oligonucleotide"
  source 1..20: mol_type = other RNA
atttccagtatgatgttgaa

SEQ ID NO: 8597 - RNA, 20 nt, synthetic construct
  misc_feature 1..20: note = source = /note="Description of Artificial Sequence: Synthetic oligonucleotide"
  source 1..20: mol_type = other RNA
agtatgatgttgaaaggcat

SEQ ID NO: 8598 - RNA, 20 nt, synthetic construct
  misc_feature 1..20: note = source = /note="Description of Artificial Sequence: Synthetic oligonucleotide"
  source 1..20: mol_type = other RNA
tgttgaaaggcattggtgag

SEQ ID NO: 8599 - RNA, 20 nt, synthetic construct
  misc_feature 1..20: note = source = /note="Description of Artificial Sequence: Synthetic oligonucleotide"
  source 1..20: mol_type = other RNA
gccttgttcctgatctcagc

SEQ ID NO: 8600 - RNA, 20 nt, synthetic construct
  misc_feature 1..20: note = source = /note="Description of Artificial Sequence: Synthetic oligonucleotide"
  source 1..20: mol_type = other RNA
tcaattttatgttagctcta

SEQ ID NO: 8601 - RNA, 20 nt, synthetic construct
  misc_feature 1..20: note = source = /note="Description of Artificial Sequence: Synthetic oligonucleotide"
  source 1..20: mol_type = other RNA
cattaaatatgttagctgta

SEQ ID NO: 8602 - RNA, 20 nt, synthetic construct
  misc_feature 1..20: note = source = /note="Description of Artificial Sequence: Synthetic oligonucleotide"
  source 1..20: mol_type = other RNA
ttttgtatatattctttatc

SEQ ID NO: 8603 - RNA, 20 nt, synthetic construct
  misc_feature 1..20: note = source = /note="Description of Artificial Sequence: Synthetic oligonucleotide"
  source 1..20: mol_type = other RNA
atatattctttatcaggttc

SEQ ID NO: 8604 - RNA, 20 nt, synthetic construct
  misc_feature 1..20: note = source = /note="Description of Artificial Sequence: Synthetic oligonucleotide"
  source 1..20: mol_type = other RNA
tcttttcctagtttactgag

SEQ ID NO: 8605 - RNA, 20 nt, synthetic construct
  misc_feature 1..20: note = source = /note="Description of Artificial Sequence: Synthetic oligonucleotide"
  source 1..20: mol_type = other RNA
tgaaaatcattaatcagtgt

SEQ ID NO: 8606 - RNA, 20 nt, synthetic construct
  misc_feature 1..20: note = source = /note="Description of Artificial Sequence: Synthetic oligonucleotide"
  source 1..20: mol_type = other RNA
tctttagcttattaacgaaa

SEQ ID NO: 8607 - RNA, 20 nt, synthetic construct
  misc_feature 1..20: note = source = /note="Description of Artificial Sequence: Synthetic oligonucleotide"
  source 1..20: mol_type = other RNA
tttcaaattttgaactagac

SEQ ID NO: 8608 - RNA, 20 nt, synthetic construct
  misc_feature 1..20: note = source = /note="Description of Artificial Sequence: Synthetic oligonucleotide"
  source 1..20: mol_type = other RNA
ttgaactagactggcatacc

SEQ ID NO: 8609 - RNA, 20 nt, synthetic construct
  misc_feature 1..20: note = source = /note="Description of Artificial Sequence: Synthetic oligonucleotide"
  source 1..20: mol_type = other RNA
tacctggagcaaatcccaca

SEQ ID NO: 8610 - RNA, 20 nt, synthetic construct
  misc_feature 1..20: note = source = /note="Description of Artificial Sequence: Synthetic oligonucleotide"
  source 1..20: mol_type = other RNA
attatttatgaatgcattca

SEQ ID NO: 8611 - RNA, 20 nt, synthetic construct
  misc_feature 1..20: note = source = /note="Description of Artificial Sequence: Synthetic oligonucleotide"
  source 1..20: mol_type = other RNA
tatgaatgcattcatggtca

SEQ ID NO: 8612 - RNA, 20 nt, synthetic construct
  misc_feature 1..20: note = source = /note="Description of Artificial Sequence: Synthetic oligonucleotide"
  source 1..20: mol_type = other RNA
atcttttattgtaaagactt

SEQ ID NO: 8613 - RNA, 20 nt, synthetic construct
  misc_feature 1..20: note = source = /note="Description of Artificial Sequence: Synthetic oligonucleotide"
  source 1..20: mol_type = other RNA
tattgtaaagactttggtgt

SEQ ID NO: 8614 - RNA, 20 nt, synthetic construct
  misc_feature 1..20: note = source = /note="Description of Artificial Sequence: Synthetic oligonucleotide"
  source 1..20: mol_type = other RNA
agactttggtgttggtatta

SEQ ID NO: 8615 - RNA, 20 nt, synthetic construct
  misc_feature 1..20: note = source = /note="Description of Artificial Sequence: Synthetic oligonucleotide"
  source 1..20: mol_type = other RNA
taatttcttccttaaaactt

SEQ ID NO: 8616 - RNA, 20 nt, synthetic construct
  misc_feature 1..20: note = source = /note="Description of Artificial Sequence: Synthetic oligonucleotide"
  source 1..20: mol_type = other RNA
cagaatgaaccatctgtgtc

SEQ ID NO: 8617 - RNA, 20 nt, synthetic construct
  misc_feature 1..20: note = source = /note="Description of Artificial Sequence: Synthetic oligonucleotide"
  source 1..20: mol_type = other RNA
tcaatttctttcatagatat

SEQ ID NO: 8618 - RNA, 20 nt, synthetic construct
  misc_feature 1..20: note = source = /note="Description of Artificial Sequence: Synthetic oligonucleotide"
  source 1..20: mol_type = other RNA
ttattattttgcataaatat

SEQ ID NO: 8619 - RNA, 20 nt, synthetic construct
  misc_feature 1..20: note = source = /note="Description of Artificial Sequence: Synthetic oligonucleotide"
  source 1..20: mol_type = other RNA
attggtagttgtgtccttca

SEQ ID NO: 8620 - RNA, 20 nt, synthetic construct
  misc_feature 1..20: note = source = /note="Description of Artificial Sequence: Synthetic oligonucleotide"
  source 1..20: mol_type = other RNA
agttgtgtccttcaaggaat

SEQ ID NO: 8621 - RNA, 20 nt, synthetic construct
  misc_feature 1..20: note = source = /note="Description of Artificial Sequence: Synthetic oligonucleotide"
  source 1..20: mol_type = other RNA
caccttgattattaaatgtg

SEQ ID NO: 8622 - RNA, 20 nt, synthetic construct
  misc_feature 1..20: note = source = /note="Description of Artificial Sequence: Synthetic oligonucleotide"
  source 1..20: mol_type = other RNA
accttgattattaaatgtgt

SEQ ID NO: 8623 - RNA, 20 nt, synthetic construct
  misc_feature 1..20: note = source = /note="Description of Artificial Sequence: Synthetic oligonucleotide"
  source 1..20: mol_type = other RNA
ttatcctttgtttttgagac

SEQ ID NO: 8624 - RNA, 20 nt, synthetic construct
  misc_feature 1..20: note = source = /note="Description of Artificial Sequence: Synthetic oligonucleotide"
  source 1..20: mol_type = other RNA
tatcctttgtttttgagaca

SEQ ID NO: 8625 - RNA, 20 nt, synthetic construct
  misc_feature 1..20: note = source = /note="Description of Artificial Sequence: Synthetic oligonucleotide"
  source 1..20: mol_type = other RNA
tttgagacagggtctcactc

SEQ ID NO: 8626 - RNA, 20 nt, synthetic construct
  misc_feature 1..20: note = source = /note="Description of Artificial Sequence: Synthetic oligonucleotide"
  source 1..20: mol_type = other RNA
gggtctcactctggttgccc

SEQ ID NO: 8627 - RNA, 20 nt, synthetic construct
  misc_feature 1..20: note = source = /note="Description of Artificial Sequence: Synthetic oligonucleotide"
  source 1..20: mol_type = other RNA
ctcactctggttgcccaggc

SEQ ID NO: 8628 - RNA, 20 nt, synthetic construct
  misc_feature 1..20: note = source = /note="Description of Artificial Sequence: Synthetic oligonucleotide"
  source 1..20: mol_type = other RNA
tcactgcagccttgacttcc

SEQ ID NO: 8629 - RNA, 20 nt, synthetic construct
  misc_feature 1..20: note = source = /note="Description of Artificial Sequence: Synthetic oligonucleotide"
  source 1..20: mol_type = other RNA
cactgcagccttgacttcct

SEQ ID NO: 8630 - RNA, 20 nt, synthetic construct
  misc_feature 1..20: note = source = /note="Description of Artificial Sequence: Synthetic oligonucleotide"
  source 1..20: mol_type = other RNA
cctcagcctcccaagtagct

SEQ ID NO: 8631 - RNA, 20 nt, synthetic construct
  misc_feature 1..20: note = source = /note="Description of Artificial Sequence: Synthetic oligonucleotide"
  source 1..20: mol_type = other RNA
tcccaagtagctcggactac

SEQ ID NO: 8632 - RNA, 20 nt, synthetic construct
  misc_feature 1..20: note = source = /note="Description of Artificial Sequence: Synthetic oligonucleotide"
  source 1..20: mol_type = other RNA
caggcacatgccaccatgcc

SEQ ID NO: 8633 - RNA, 20 nt, synthetic construct
  misc_feature 1..20: note = source = /note="Description of Artificial Sequence: Synthetic oligonucleotide"
  source 1..20: mol_type = other RNA
ttttttattattattagaga

SEQ ID NO: 8634 - RNA, 20 nt, synthetic construct
  misc_feature 1..20: note = source = /note="Description of Artificial Sequence: Synthetic oligonucleotide"
  source 1..20: mol_type = other RNA
ttttcctatgttgcccagtg

SEQ ID NO: 8635 - RNA, 20 nt, synthetic construct
  misc_feature 1..20: note = source = /note="Description of Artificial Sequence: Synthetic oligonucleotide"
  source 1..20: mol_type = other RNA
ccagtgtggtcttgaactcc

SEQ ID NO: 8636 - RNA, 20 nt, synthetic construct
  misc_feature 1..20: note = source = /note="Description of Artificial Sequence: Synthetic oligonucleotide"
  source 1..20: mol_type = other RNA
cctcagcctccaaagagtga

SEQ ID NO: 8637 - RNA, 20 nt, synthetic construct
  misc_feature 1..20: note = source = /note="Description of Artificial Sequence: Synthetic oligonucleotide"
  source 1..20: mol_type = other RNA
ctcagcctccaaagagtgat

SEQ ID NO: 8638 - RNA, 20 nt, synthetic construct
  misc_feature 1..20: note = source = /note="Description of Artificial Sequence: Synthetic oligonucleotide"
  source 1..20: mol_type = other RNA
ccaaagagtgatgggattgc

SEQ ID NO: 8639 - RNA, 20 nt, synthetic construct
  misc_feature 1..20: note = source = /note="Description of Artificial Sequence: Synthetic oligonucleotide"
  source 1..20: mol_type = other RNA
agccatcacacctagcctga

SEQ ID NO: 8640 - RNA, 20 nt, synthetic construct
  misc_feature 1..20: note = source = /note="Description of Artificial Sequence: Synthetic oligonucleotide"
  source 1..20: mol_type = other RNA
gcctgatggcagaacttttt

SEQ ID NO: 8641 - RNA, 20 nt, synthetic construct
  misc_feature 1..20: note = source = /note="Description of Artificial Sequence: Synthetic oligonucleotide"
  source 1..20: mol_type = other RNA
actttttaggaacaatagaa

SEQ ID NO: 8642 - RNA, 20 nt, synthetic construct
  misc_feature 1..20: note = source = /note="Description of Artificial Sequence: Synthetic oligonucleotide"
  source 1..20: mol_type = other RNA
aggaacaatagaatggtata

SEQ ID NO: 8643 - RNA, 20 nt, synthetic construct
  misc_feature 1..20: note = source = /note="Description of Artificial Sequence: Synthetic oligonucleotide"
  source 1..20: mol_type = other RNA
attgttttcccctcctccta

SEQ ID NO: 8644 - RNA, 20 nt, synthetic construct
  misc_feature 1..20: note = source = /note="Description of Artificial Sequence: Synthetic oligonucleotide"
  source 1..20: mol_type = other RNA
ctcctcctatggaagcatga

SEQ ID NO: 8645 - RNA, 20 nt, synthetic construct
  misc_feature 1..20: note = source = /note="Description of Artificial Sequence: Synthetic oligonucleotide"
  source 1..20: mol_type = other RNA
tcctcctatggaagcatgaa

SEQ ID NO: 8646 - RNA, 20 nt, synthetic construct
  misc_feature 1..20: note = source = /note="Description of Artificial Sequence: Synthetic oligonucleotide"
  source 1..20: mol_type = other RNA
ttcattgtgagaacctcatc

SEQ ID NO: 8647 - RNA, 20 nt, synthetic construct
  misc_feature 1..20: note = source = /note="Description of Artificial Sequence: Synthetic oligonucleotide"
  source 1..20: mol_type = other RNA
agaaaactcacaaaactgtg

SEQ ID NO: 8648 - RNA, 20 nt, synthetic construct
  misc_feature 1..20: note = source = /note="Description of Artificial Sequence: Synthetic oligonucleotide"
  source 1..20: mol_type = other RNA
tgtgaggaacctattatgac

SEQ ID NO: 8649 - RNA, 20 nt, synthetic construct
  misc_feature 1..20: note = source = /note="Description of Artificial Sequence: Synthetic oligonucleotide"
  source 1..20: mol_type = other RNA
ctattatgactggatgcctt

SEQ ID NO: 8650 - RNA, 20 nt, synthetic construct
  misc_feature 1..20: note = source = /note="Description of Artificial Sequence: Synthetic oligonucleotide"
  source 1..20: mol_type = other RNA
agattttcctatcccaacac

SEQ ID NO: 8651 - RNA, 20 nt, synthetic construct
  misc_feature 1..20: note = source = /note="Description of Artificial Sequence: Synthetic oligonucleotide"
  source 1..20: mol_type = other RNA
cccaacactggttcctacag

SEQ ID NO: 8652 - RNA, 20 nt, synthetic construct
  misc_feature 1..20: note = source = /note="Description of Artificial Sequence: Synthetic oligonucleotide"
  source 1..20: mol_type = other RNA
tttttatccatctgcttcct

SEQ ID NO: 8653 - RNA, 20 nt, synthetic construct
  misc_feature 1..20: note = source = /note="Description of Artificial Sequence: Synthetic oligonucleotide"
  source 1..20: mol_type = other RNA
catctgcttccttggttgtg

SEQ ID NO: 8654 - RNA, 20 nt, synthetic construct
  misc_feature 1..20: note = source = /note="Description of Artificial Sequence: Synthetic oligonucleotide"
  source 1..20: mol_type = other RNA
atctgcttccttggttgtga

SEQ ID NO: 8655 - RNA, 20 nt, synthetic construct
  misc_feature 1..20: note = source = /note="Description of Artificial Sequence: Synthetic oligonucleotide"
  source 1..20: mol_type = other RNA
tacatcttttaacctgttgt

SEQ ID NO: 8656 - RNA, 20 nt, synthetic construct
  misc_feature 1..20: note = source = /note="Description of Artificial Sequence: Synthetic oligonucleotide"
  source 1..20: mol_type = other RNA
tcgagttttcatttacaaca

SEQ ID NO: 8657 - RNA, 20 nt, synthetic construct
  misc_feature 1..20: note = source = /note="Description of Artificial Sequence: Synthetic oligonucleotide"
  source 1..20: mol_type = other RNA
tttttgattcctgactgtat

SEQ ID NO: 8658 - RNA, 20 nt, synthetic construct
  misc_feature 1..20: note = source = /note="Description of Artificial Sequence: Synthetic oligonucleotide"
  source 1..20: mol_type = other RNA
acttgacatacagtccatcc

SEQ ID NO: 8659 - RNA, 20 nt, synthetic construct
  misc_feature 1..20: note = source = /note="Description of Artificial Sequence: Synthetic oligonucleotide"
  source 1..20: mol_type = other RNA
gaatgtgtatattcagctgt

SEQ ID NO: 8660 - RNA, 20 nt, synthetic construct
  misc_feature 1..20: note = source = /note="Description of Artificial Sequence: Synthetic oligonucleotide"
  source 1..20: mol_type = other RNA
tgtgtatattcagctgttgg

SEQ ID NO: 8661 - RNA, 20 nt, synthetic construct
  misc_feature 1..20: note = source = /note="Description of Artificial Sequence: Synthetic oligonucleotide"
  source 1..20: mol_type = other RNA
gtgtatattcagctgttggt

SEQ ID NO: 8662 - RNA, 20 nt, synthetic construct
  misc_feature 1..20: note = source = /note="Description of Artificial Sequence: Synthetic oligonucleotide"
  source 1..20: mol_type = other RNA
tatattcagctgttggtggg

SEQ ID NO: 8663 - RNA, 20 nt, synthetic construct
  misc_feature 1..20: note = source = /note="Description of Artificial Sequence: Synthetic oligonucleotide"
  source 1..20: mol_type = other RNA
agatgtctgttagacctagt

SEQ ID NO: 8664 - RNA, 20 nt, synthetic construct
  misc_feature 1..20: note = source = /note="Description of Artificial Sequence: Synthetic oligonucleotide"
  source 1..20: mol_type = other RNA
cttttagccattattgaaag

SEQ ID NO: 8665 - RNA, 20 nt, synthetic construct
  misc_feature 1..20: note = source = /note="Description of Artificial Sequence: Synthetic oligonucleotide"
  source 1..20: mol_type = other RNA
attttttgcttcatgtattt

SEQ ID NO: 8666 - RNA, 20 nt, synthetic construct
  misc_feature 1..20: note = source = /note="Description of Artificial Sequence: Synthetic oligonucleotide"
  source 1..20: mol_type = other RNA
catttgttacatcattttaa

SEQ ID NO: 8667 - RNA, 20 nt, synthetic construct
  misc_feature 1..20: note = source = /note="Description of Artificial Sequence: Synthetic oligonucleotide"
  source 1..20: mol_type = other RNA
atttaacataattattgata

SEQ ID NO: 8668 - RNA, 20 nt, synthetic construct
  misc_feature 1..20: note = source = /note="Description of Artificial Sequence: Synthetic oligonucleotide"
  source 1..20: mol_type = other RNA
aacataattattgataaggt

SEQ ID NO: 8669 - RNA, 20 nt, synthetic construct
  misc_feature 1..20: note = source = /note="Description of Artificial Sequence: Synthetic oligonucleotide"
  source 1..20: mol_type = other RNA
aaattttttgatgttcttaa

SEQ ID NO: 8670 - RNA, 20 nt, synthetic construct
  misc_feature 1..20: note = source = /note="Description of Artificial Sequence: Synthetic oligonucleotide"
  source 1..20: mol_type = other RNA
gatgttcttaatggtttccc

SEQ ID NO: 8671 - RNA, 20 nt, synthetic construct
  misc_feature 1..20: note = source = /note="Description of Artificial Sequence: Synthetic oligonucleotide"
  source 1..20: mol_type = other RNA
atgttcttaatggtttccct

SEQ ID NO: 8672 - RNA, 20 nt, synthetic construct
  misc_feature 1..20: note = source = /note="Description of Artificial Sequence: Synthetic oligonucleotide"
  source 1..20: mol_type = other RNA
tgttcttaatggtttccctg

SEQ ID NO: 8673 - RNA, 20 nt, synthetic construct
  misc_feature 1..20: note = source = /note="Description of Artificial Sequence: Synthetic oligonucleotide"
  source 1..20: mol_type = other RNA
accaatttcattacaatata

SEQ ID NO: 8674 - RNA, 20 nt, synthetic construct
  misc_feature 1..20: note = source = /note="Description of Artificial Sequence: Synthetic oligonucleotide"
  source 1..20: mol_type = other RNA
acctatgtaattatctttac

SEQ ID NO: 8675 - RNA, 20 nt, synthetic construct
  misc_feature 1..20: note = source = /note="Description of Artificial Sequence: Synthetic oligonucleotide"
  source 1..20: mol_type = other RNA
ctggtgctctttaagttctt

SEQ ID NO: 8676 - RNA, 20 nt, synthetic construct
  misc_feature 1..20: note = source = /note="Description of Artificial Sequence: Synthetic oligonucleotide"
  source 1..20: mol_type = other RNA
taagttcttaggtgtatttg

SEQ ID NO: 8677 - RNA, 20 nt, synthetic construct
  misc_feature 1..20: note = source = /note="Description of Artificial Sequence: Synthetic oligonucleotide"
  source 1..20: mol_type = other RNA
atacatttagtattttttgt

SEQ ID NO: 8678 - RNA, 20 nt, synthetic construct
  misc_feature 1..20: note = source = /note="Description of Artificial Sequence: Synthetic oligonucleotide"
  source 1..20: mol_type = other RNA
tttgcaaaatacagaattct

SEQ ID NO: 8679 - RNA, 20 nt, synthetic construct
  misc_feature 1..20: note = source = /note="Description of Artificial Sequence: Synthetic oligonucleotide"
  source 1..20: mol_type = other RNA
caaaatacagaattcttggt

SEQ ID NO: 8680 - RNA, 20 nt, synthetic construct
  misc_feature 1..20: note = source = /note="Description of Artificial Sequence: Synthetic oligonucleotide"
  source 1..20: mol_type = other RNA
ggttggcagtctttttcttg

SEQ ID NO: 8681 - RNA, 20 nt, synthetic construct
  misc_feature 1..20: note = source = /note="Description of Artificial Sequence: Synthetic oligonucleotide"
  source 1..20: mol_type = other RNA
tatgtcattctactgccttc

SEQ ID NO: 8682 - RNA, 20 nt, synthetic construct
  misc_feature 1..20: note = source = /note="Description of Artificial Sequence: Synthetic oligonucleotide"
  source 1..20: mol_type = other RNA
agatcagctattaatcttat

SEQ ID NO: 8683 - RNA, 20 nt, synthetic construct
  misc_feature 1..20: note = source = /note="Description of Artificial Sequence: Synthetic oligonucleotide"
  source 1..20: mol_type = other RNA
gatcagctattaatcttatt

SEQ ID NO: 8684 - RNA, 20 nt, synthetic construct
  misc_feature 1..20: note = source = /note="Description of Artificial Sequence: Synthetic oligonucleotide"
  source 1..20: mol_type = other RNA
ttttcatgattttcttgtgt

SEQ ID NO: 8685 - RNA, 20 nt, synthetic construct
  misc_feature 1..20: note = source = /note="Description of Artificial Sequence: Synthetic oligonucleotide"
  source 1..20: mol_type = other RNA
tgtgttggctttcagcagtt

SEQ ID NO: 8686 - RNA, 20 nt, synthetic construct
  misc_feature 1..20: note = source = /note="Description of Artificial Sequence: Synthetic oligonucleotide"
  source 1..20: mol_type = other RNA
tttatatgtatgcatatctt

SEQ ID NO: 8687 - RNA, 20 nt, synthetic construct
  misc_feature 1..20: note = source = /note="Description of Artificial Sequence: Synthetic oligonucleotide"
  source 1..20: mol_type = other RNA
ttatatgtatgcatatcttt

SEQ ID NO: 8688 - RNA, 20 nt, synthetic construct
  misc_feature 1..20: note = source = /note="Description of Artificial Sequence: Synthetic oligonucleotide"
  source 1..20: mol_type = other RNA
atctttgggtttatgttaca

SEQ ID NO: 8689 - RNA, 20 nt, synthetic construct
  misc_feature 1..20: note = source = /note="Description of Artificial Sequence: Synthetic oligonucleotide"
  source 1..20: mol_type = other RNA
atggagttagttgagcttct

SEQ ID NO: 8690 - RNA, 20 nt, synthetic construct
  misc_feature 1..20: note = source = /note="Description of Artificial Sequence: Synthetic oligonucleotide"
  source 1..20: mol_type = other RNA
catcaaatttgagaagtttt

SEQ ID NO: 8691 - RNA, 20 nt, synthetic construct
  misc_feature 1..20: note = source = /note="Description of Artificial Sequence: Synthetic oligonucleotide"
  source 1..20: mol_type = other RNA
ttattcttcatcctctactt

SEQ ID NO: 8692 - RNA, 20 nt, synthetic construct
  misc_feature 1..20: note = source = /note="Description of Artificial Sequence: Synthetic oligonucleotide"
  source 1..20: mol_type = other RNA
tattcttcatcctctacttt

SEQ ID NO: 8693 - RNA, 20 nt, synthetic construct
  misc_feature 1..20: note = source = /note="Description of Artificial Sequence: Synthetic oligonucleotide"
  source 1..20: mol_type = other RNA
attcttcatcctctactttg

SEQ ID NO: 8694 - RNA, 20 nt, synthetic construct
  misc_feature 1..20: note = source = /note="Description of Artificial Sequence: Synthetic oligonucleotide"
  source 1..20: mol_type = other RNA
gacctgcattatgtctatgt

SEQ ID NO: 8695 - RNA, 20 nt, synthetic construct
  misc_feature 1..20: note = source = /note="Description of Artificial Sequence: Synthetic oligonucleotide"
  source 1..20: mol_type = other RNA
gtctatgttggtatgcttta

SEQ ID NO: 8696 - RNA, 20 nt, synthetic construct
  misc_feature 1..20: note = source = /note="Description of Artificial Sequence: Synthetic oligonucleotide"
  source 1..20: mol_type = other RNA
tggtcttccacagatctctg

SEQ ID NO: 8697 - RNA, 20 nt, synthetic construct
  misc_feature 1..20: note = source = /note="Description of Artificial Sequence: Synthetic oligonucleotide"
  source 1..20: mol_type = other RNA
tacagttttctttcattatt

SEQ ID NO: 8698 - RNA, 20 nt, synthetic construct
  misc_feature 1..20: note = source = /note="Description of Artificial Sequence: Synthetic oligonucleotide"
  source 1..20: mol_type = other RNA
acagttttctttcattattt

SEQ ID NO: 8699 - RNA, 20 nt, synthetic construct
  misc_feature 1..20: note = source = /note="Description of Artificial Sequence: Synthetic oligonucleotide"
  source 1..20: mol_type = other RNA
gacttaaagtctttgtccag

SEQ ID NO: 8700 - RNA, 20 nt, synthetic construct
  misc_feature 1..20: note = source = /note="Description of Artificial Sequence: Synthetic oligonucleotide"
  source 1..20: mol_type = other RNA
ttgtccagtggcctaacatc

SEQ ID NO: 8701 - RNA, 20 nt, synthetic construct
  misc_feature 1..20: note = source = /note="Description of Artificial Sequence: Synthetic oligonucleotide"
  source 1..20: mol_type = other RNA
cctaacatctggactttttc

SEQ ID NO: 8702 - RNA, 20 nt, synthetic construct
  misc_feature 1..20: note = source = /note="Description of Artificial Sequence: Synthetic oligonucleotide"
  source 1..20: mol_type = other RNA
gcctctattgactactttat

SEQ ID NO: 8703 - RNA, 20 nt, synthetic construct
  misc_feature 1..20: note = source = /note="Description of Artificial Sequence: Synthetic oligonucleotide"
  source 1..20: mol_type = other RNA
cctctattgactactttata

SEQ ID NO: 8704 - RNA, 20 nt, synthetic construct
  misc_feature 1..20: note = source = /note="Description of Artificial Sequence: Synthetic oligonucleotide"
  source 1..20: mol_type = other RNA
ctctattgactactttatag

SEQ ID NO: 8705 - RNA, 20 nt, synthetic construct
  misc_feature 1..20: note = source = /note="Description of Artificial Sequence: Synthetic oligonucleotide"
  source 1..20: mol_type = other RNA
gacattttaaactaatgtaa

SEQ ID NO: 8706 - RNA, 20 nt, synthetic construct
  misc_feature 1..20: note = source = /note="Description of Artificial Sequence: Synthetic oligonucleotide"
  source 1..20: mol_type = other RNA
aatgtaatggctgagagcag

SEQ ID NO: 8707 - RNA, 20 nt, synthetic construct
  misc_feature 1..20: note = source = /note="Description of Artificial Sequence: Synthetic oligonucleotide"
  source 1..20: mol_type = other RNA
tgtaatcccagcacgttgag

SEQ ID NO: 8708 - RNA, 20 nt, synthetic construct
  misc_feature 1..20: note = source = /note="Description of Artificial Sequence: Synthetic oligonucleotide"
  source 1..20: mol_type = other RNA
gcacgttgagaggccaaagc

SEQ ID NO: 8709 - RNA, 20 nt, synthetic construct
  misc_feature 1..20: note = source = /note="Description of Artificial Sequence: Synthetic oligonucleotide"
  source 1..20: mol_type = other RNA
caggagcatcacttaagccc

SEQ ID NO: 8710 - RNA, 20 nt, synthetic construct
  misc_feature 1..20: note = source = /note="Description of Artificial Sequence: Synthetic oligonucleotide"
  source 1..20: mol_type = other RNA
ccaggagttcaagactagcc

SEQ ID NO: 8711 - RNA, 20 nt, synthetic construct
  misc_feature 1..20: note = source = /note="Description of Artificial Sequence: Synthetic oligonucleotide"
  source 1..20: mol_type = other RNA
caggagttcaagactagcct

SEQ ID NO: 8712 - RNA, 20 nt, synthetic construct
  misc_feature 1..20: note = source = /note="Description of Artificial Sequence: Synthetic oligonucleotide"
  source 1..20: mol_type = other RNA
ataaataaaataatataatc

SEQ ID NO: 8713 - RNA, 20 nt, synthetic construct
  misc_feature 1..20: note = source = /note="Description of Artificial Sequence: Synthetic oligonucleotide"
  source 1..20: mol_type = other RNA
ccagaatatgttactgtttc

SEQ ID NO: 8714 - RNA, 20 nt, synthetic construct
  misc_feature 1..20: note = source = /note="Description of Artificial Sequence: Synthetic oligonucleotide"
  source 1..20: mol_type = other RNA
gaatatgttactgtttctgg

SEQ ID NO: 8715 - RNA, 20 nt, synthetic construct
  misc_feature 1..20: note = source = /note="Description of Artificial Sequence: Synthetic oligonucleotide"
  source 1..20: mol_type = other RNA
tagccatcgaagtctttgct

SEQ ID NO: 8716 - RNA, 20 nt, synthetic construct
  misc_feature 1..20: note = source = /note="Description of Artificial Sequence: Synthetic oligonucleotide"
  source 1..20: mol_type = other RNA
tctttgcttggttaacttag

SEQ ID NO: 8717 - RNA, 20 nt, synthetic construct
  misc_feature 1..20: note = source = /note="Description of Artificial Sequence: Synthetic oligonucleotide"
  source 1..20: mol_type = other RNA
gttaacttagaggtcagcta

SEQ ID NO: 8718 - RNA, 20 nt, synthetic construct
  misc_feature 1..20: note = source = /note="Description of Artificial Sequence: Synthetic oligonucleotide"
  source 1..20: mol_type = other RNA
aggattagacagaattcctt

SEQ ID NO: 8719 - RNA, 20 nt, synthetic construct
  misc_feature 1..20: note = source = /note="Description of Artificial Sequence: Synthetic oligonucleotide"
  source 1..20: mol_type = other RNA
aataagtcagtctttgacaa

SEQ ID NO: 8720 - RNA, 20 nt, synthetic construct
  misc_feature 1..20: note = source = /note="Description of Artificial Sequence: Synthetic oligonucleotide"
  source 1..20: mol_type = other RNA
ataagtcagtctttgacaaa

SEQ ID NO: 8721 - RNA, 20 nt, synthetic construct
  misc_feature 1..20: note = source = /note="Description of Artificial Sequence: Synthetic oligonucleotide"
  source 1..20: mol_type = other RNA
taagtcagtctttgacaaag

SEQ ID NO: 8722 - RNA, 20 nt, synthetic construct
  misc_feature 1..20: note = source = /note="Description of Artificial Sequence: Synthetic oligonucleotide"
  source 1..20: mol_type = other RNA
aaaggggtctgtatgtgtgt

SEQ ID NO: 8723 - RNA, 20 nt, synthetic construct
  misc_feature 1..20: note = source = /note="Description of Artificial Sequence: Synthetic oligonucleotide"
  source 1..20: mol_type = other RNA
aaggggtctgtatgtgtgtt

SEQ ID NO: 8724 - RNA, 20 nt, synthetic construct
  misc_feature 1..20: note = source = /note="Description of Artificial Sequence: Synthetic oligonucleotide"
  source 1..20: mol_type = other RNA
aggggtctgtatgtgtgttg

SEQ ID NO: 8725 - RNA, 20 nt, synthetic construct
  misc_feature 1..20: note = source = /note="Description of Artificial Sequence: Synthetic oligonucleotide"
  source 1..20: mol_type = other RNA
catgcattcaacactcagcc

SEQ ID NO: 8726 - RNA, 20 nt, synthetic construct
  misc_feature 1..20: note = source = /note="Description of Artificial Sequence: Synthetic oligonucleotide"
  source 1..20: mol_type = other RNA
agccaggctatttgcagctc

SEQ ID NO: 8727 - RNA, 20 nt, synthetic construct
  misc_feature 1..20: note = source = /note="Description of Artificial Sequence: Synthetic oligonucleotide"
  source 1..20: mol_type = other RNA
cctgcttgtgcagagtctca

SEQ ID NO: 8728 - RNA, 20 nt, synthetic construct
  misc_feature 1..20: note = source = /note="Description of Artificial Sequence: Synthetic oligonucleotide"
  source 1..20: mol_type = other RNA
agagtctcaaggttagactg

SEQ ID NO: 8729 - RNA, 20 nt, synthetic construct
  misc_feature 1..20: note = source = /note="Description of Artificial Sequence: Synthetic oligonucleotide"
  source 1..20: mol_type = other RNA
ttagactgtggtgagagttt

SEQ ID NO: 8730 - RNA, 20 nt, synthetic construct
  misc_feature 1..20: note = source = /note="Description of Artificial Sequence: Synthetic oligonucleotide"
  source 1..20: mol_type = other RNA
tagactgtggtgagagttta

SEQ ID NO: 8731 - RNA, 20 nt, synthetic construct
  misc_feature 1..20: note = source = /note="Description of Artificial Sequence: Synthetic oligonucleotide"
  source 1..20: mol_type = other RNA
tgagagtttagggctttctg

SEQ ID NO: 8732 - RNA, 20 nt, synthetic construct
  misc_feature 1..20: note = source = /note="Description of Artificial Sequence: Synthetic oligonucleotide"
  source 1..20: mol_type = other RNA
gggctttctgaggtcttttg

SEQ ID NO: 8733 - RNA, 20 nt, synthetic construct
  misc_feature 1..20: note = source = /note="Description of Artificial Sequence: Synthetic oligonucleotide"
  source 1..20: mol_type = other RNA
ggctttctgaggtcttttgt

SEQ ID NO: 8734 - RNA, 20 nt, synthetic construct
  misc_feature 1..20: note = source = /note="Description of Artificial Sequence: Synthetic oligonucleotide"
  source 1..20: mol_type = other RNA
gtgggccctacagttgcatg

SEQ ID NO: 8735 - RNA, 20 nt, synthetic construct
  misc_feature 1..20: note = source = /note="Description of Artificial Sequence: Synthetic oligonucleotide"
  source 1..20: mol_type = other RNA
atgtggctttctaaattccc

SEQ ID NO: 8736 - RNA, 20 nt, synthetic construct
  misc_feature 1..20: note = source = /note="Description of Artificial Sequence: Synthetic oligonucleotide"
  source 1..20: mol_type = other RNA
tatattttcaaagcctcctg

SEQ ID NO: 8737 - RNA, 20 nt, synthetic construct
  misc_feature 1..20: note = source = /note="Description of Artificial Sequence: Synthetic oligonucleotide"
  source 1..20: mol_type = other RNA
tgtggatcatctcatttccc

SEQ ID NO: 8738 - RNA, 20 nt, synthetic construct
  misc_feature 1..20: note = source = /note="Description of Artificial Sequence: Synthetic oligonucleotide"
  source 1..20: mol_type = other RNA
ttatttgacaaatgcctctg

SEQ ID NO: 8739 - RNA, 20 nt, synthetic construct
  misc_feature 1..20: note = source = /note="Description of Artificial Sequence: Synthetic oligonucleotide"
  source 1..20: mol_type = other RNA
gacaaatgcctctgtggaaa

SEQ ID NO: 8740 - RNA, 20 nt, synthetic construct
  misc_feature 1..20: note = source = /note="Description of Artificial Sequence: Synthetic oligonucleotide"
  source 1..20: mol_type = other RNA
aaatgcctctgtggaaaagg

SEQ ID NO: 8741 - RNA, 20 nt, synthetic construct
  misc_feature 1..20: note = source = /note="Description of Artificial Sequence: Synthetic oligonucleotide"
  source 1..20: mol_type = other RNA
tggaaaaggtggttcacact

SEQ ID NO: 8742 - RNA, 20 nt, synthetic construct
  misc_feature 1..20: note = source = /note="Description of Artificial Sequence: Synthetic oligonucleotide"
  source 1..20: mol_type = other RNA
agtaaagataaccttactag

SEQ ID NO: 8743 - RNA, 20 nt, synthetic construct
  misc_feature 1..20: note = source = /note="Description of Artificial Sequence: Synthetic oligonucleotide"
  source 1..20: mol_type = other RNA
gtaaagataaccttactagt

SEQ ID NO: 8744 - RNA, 20 nt, synthetic construct
  misc_feature 1..20: note = source = /note="Description of Artificial Sequence: Synthetic oligonucleotide"
  source 1..20: mol_type = other RNA
ccttactagtgggatcttcc

SEQ ID NO: 8745 - RNA, 20 nt, synthetic construct
  misc_feature 1..20: note = source = /note="Description of Artificial Sequence: Synthetic oligonucleotide"
  source 1..20: mol_type = other RNA
cttccaggaaactaccaaac

SEQ ID NO: 8746 - RNA, 20 nt, synthetic construct
  misc_feature 1..20: note = source = /note="Description of Artificial Sequence: Synthetic oligonucleotide"
  source 1..20: mol_type = other RNA
caaacaggtcaaataatgta

SEQ ID NO: 8747 - RNA, 20 nt, synthetic construct
  misc_feature 1..20: note = source = /note="Description of Artificial Sequence: Synthetic oligonucleotide"
  source 1..20: mol_type = other RNA
taatgtaaggtctctgtgaa

SEQ ID NO: 8748 - RNA, 20 nt, synthetic construct
  misc_feature 1..20: note = source = /note="Description of Artificial Sequence: Synthetic oligonucleotide"
  source 1..20: mol_type = other RNA
aatgtaaggtctctgtgaat

SEQ ID NO: 8749 - RNA, 20 nt, synthetic construct
  misc_feature 1..20: note = source = /note="Description of Artificial Sequence: Synthetic oligonucleotide"
  source 1..20: mol_type = other RNA
tagagtatatccaaccaatc

SEQ ID NO: 8750 - RNA, 20 nt, synthetic construct
  misc_feature 1..20: note = source = /note="Description of Artificial Sequence: Synthetic oligonucleotide"
  source 1..20: mol_type = other RNA
accaatctggcctcctctag

SEQ ID NO: 8751 - RNA, 20 nt, synthetic construct
  misc_feature 1..20: note = source = /note="Description of Artificial Sequence: Synthetic oligonucleotide"
  source 1..20: mol_type = other RNA
ggcctcctctagtggcagcc

SEQ ID NO: 8752 - RNA, 20 nt, synthetic construct
  misc_feature 1..20: note = source = /note="Description of Artificial Sequence: Synthetic oligonucleotide"
  source 1..20: mol_type = other RNA
gctgcttttcataataaatg

SEQ ID NO: 8753 - RNA, 20 nt, synthetic construct
  misc_feature 1..20: note = source = /note="Description of Artificial Sequence: Synthetic oligonucleotide"
  source 1..20: mol_type = other RNA
ctgcttttcataataaatgt

SEQ ID NO: 8754 - RNA, 20 nt, synthetic construct
  misc_feature 1..20: note = source = /note="Description of Artificial Sequence: Synthetic oligonucleotide"
  source 1..20: mol_type = other RNA
tgtgggctgttttgatttga

SEQ ID NO: 8755 - RNA, 20 nt, synthetic construct
  misc_feature 1..20: note = source = /note="Description of Artificial Sequence: Synthetic oligonucleotide"
  source 1..20: mol_type = other RNA
tgaaggctaccatagagctg

SEQ ID NO: 8756 - RNA, 20 nt, synthetic construct
  misc_feature 1..20: note = source = /note="Description of Artificial Sequence: Synthetic oligonucleotide"
  source 1..20: mol_type = other RNA
gaaggctaccatagagctgt

SEQ ID NO: 8757 - RNA, 20 nt, synthetic construct
  misc_feature 1..20: note = source = /note="Description of Artificial Sequence: Synthetic oligonucleotide"
  source 1..20: mol_type = other RNA
aaggctaccatagagctgtg

SEQ ID NO: 8758 - RNA, 20 nt, synthetic construct
  misc_feature 1..20: note = source = /note="Description of Artificial Sequence: Synthetic oligonucleotide"
  source 1..20: mol_type = other RNA
cagtacttttattgctttta

SEQ ID NO: 8759 - RNA, 20 nt, synthetic construct
  misc_feature 1..20: note = source = /note="Description of Artificial Sequence: Synthetic oligonucleotide"
  source 1..20: mol_type = other RNA
tacttttattgcttttatgg

SEQ ID NO: 8760 - RNA, 20 nt, synthetic construct
  misc_feature 1..20: note = source = /note="Description of Artificial Sequence: Synthetic oligonucleotide"
  source 1..20: mol_type = other RNA
ttccttttgcatttattagc

SEQ ID NO: 8761 - RNA, 20 nt, synthetic construct
  misc_feature 1..20: note = source = /note="Description of Artificial Sequence: Synthetic oligonucleotide"
  source 1..20: mol_type = other RNA
tattagctggaatactttac

SEQ ID NO: 8762 - RNA, 20 nt, synthetic construct
  misc_feature 1..20: note = source = /note="Description of Artificial Sequence: Synthetic oligonucleotide"
  source 1..20: mol_type = other RNA
agaatgatagaataaatgca

SEQ ID NO: 8763 - RNA, 20 nt, synthetic construct
  misc_feature 1..20: note = source = /note="Description of Artificial Sequence: Synthetic oligonucleotide"
  source 1..20: mol_type = other RNA
tcaaatttcagagattttga

SEQ ID NO: 8764 - RNA, 20 nt, synthetic construct
  misc_feature 1..20: note = source = /note="Description of Artificial Sequence: Synthetic oligonucleotide"
  source 1..20: mol_type = other RNA
caaatttcagagattttgat

SEQ ID NO: 8765 - RNA, 20 nt, synthetic construct
  misc_feature 1..20: note = source = /note="Description of Artificial Sequence: Synthetic oligonucleotide"
  source 1..20: mol_type = other RNA
tctagatgtgctccctgcta

SEQ ID NO: 8766 - RNA, 20 nt, synthetic construct
  misc_feature 1..20: note = source = /note="Description of Artificial Sequence: Synthetic oligonucleotide"
  source 1..20: mol_type = other RNA
agatgtgctccctgctatgg

SEQ ID NO: 8767 - RNA, 20 nt, synthetic construct
  misc_feature 1..20: note = source = /note="Description of Artificial Sequence: Synthetic oligonucleotide"
  source 1..20: mol_type = other RNA
atggaggtgtcattactttt

SEQ ID NO: 8768 - RNA, 20 nt, synthetic construct
  misc_feature 1..20: note = source = /note="Description of Artificial Sequence: Synthetic oligonucleotide"
  source 1..20: mol_type = other RNA
ttacttttaggcttttttaa

SEQ ID NO: 8769 - RNA, 20 nt, synthetic construct
  misc_feature 1..20: note = source = /note="Description of Artificial Sequence: Synthetic oligonucleotide"
  source 1..20: mol_type = other RNA
tacttttaggcttttttaat

SEQ ID NO: 8770 - RNA, 20 nt, synthetic construct
  misc_feature 1..20: note = source = /note="Description of Artificial Sequence: Synthetic oligonucleotide"
  source 1..20: mol_type = other RNA
ctcttgtacactgaaattct

SEQ ID NO: 8771 - RNA, 20 nt, synthetic construct
  misc_feature 1..20: note = source = /note="Description of Artificial Sequence: Synthetic oligonucleotide"
  source 1..20: mol_type = other RNA
tcattagaatgtatcaaact

SEQ ID NO: 8772 - RNA, 20 nt, synthetic construct
  misc_feature 1..20: note = source = /note="Description of Artificial Sequence: Synthetic oligonucleotide"
  source 1..20: mol_type = other RNA
cattagaatgtatcaaacta

SEQ ID NO: 8773 - RNA, 20 nt, synthetic construct
  misc_feature 1..20: note = source = /note="Description of Artificial Sequence: Synthetic oligonucleotide"
  source 1..20: mol_type = other RNA
ctatattttagccagaaact

SEQ ID NO: 8774 - RNA, 20 nt, synthetic construct
  misc_feature 1..20: note = source = /note="Description of Artificial Sequence: Synthetic oligonucleotide"
  source 1..20: mol_type = other RNA
agcactcaaatgcccatcaa

SEQ ID NO: 8775 - RNA, 20 nt, synthetic construct
  misc_feature 1..20: note = source = /note="Description of Artificial Sequence: Synthetic oligonucleotide"
  source 1..20: mol_type = other RNA
ttcatcacatttttataaga

SEQ ID NO: 8776 - RNA, 20 nt, synthetic construct
  misc_feature 1..20: note = source = /note="Description of Artificial Sequence: Synthetic oligonucleotide"
  source 1..20: mol_type = other RNA
catttttataagatggaata

SEQ ID NO: 8777 - RNA, 20 nt, synthetic construct
  misc_feature 1..20: note = source = /note="Description of Artificial Sequence: Synthetic oligonucleotide"
  source 1..20: mol_type = other RNA
tacaactacatgcagtgatt

SEQ ID NO: 8778 - RNA, 20 nt, synthetic construct
  misc_feature 1..20: note = source = /note="Description of Artificial Sequence: Synthetic oligonucleotide"
  source 1..20: mol_type = other RNA
actacatgcagtgatttgga

SEQ ID NO: 8779 - RNA, 20 nt, synthetic construct
  misc_feature 1..20: note = source = /note="Description of Artificial Sequence: Synthetic oligonucleotide"
  source 1..20: mol_type = other RNA
gatggatatcccaaacataa

SEQ ID NO: 8780 - RNA, 20 nt, synthetic construct
  misc_feature 1..20: note = source = /note="Description of Artificial Sequence: Synthetic oligonucleotide"
  source 1..20: mol_type = other RNA
tatatatcaagtataaaagt

SEQ ID NO: 8781 - RNA, 20 nt, synthetic construct
  misc_feature 1..20: note = source = /note="Description of Artificial Sequence: Synthetic oligonucleotide"
  source 1..20: mol_type = other RNA
taggcaaaacaagctactga

SEQ ID NO: 8782 - RNA, 20 nt, synthetic construct
  misc_feature 1..20: note = source = /note="Description of Artificial Sequence: Synthetic oligonucleotide"
  source 1..20: mol_type = other RNA
gcaaaacaagctactgatgg

SEQ ID NO: 8783 - RNA, 20 nt, synthetic construct
  misc_feature 1..20: note = source = /note="Description of Artificial Sequence: Synthetic oligonucleotide"
  source 1..20: mol_type = other RNA
cacctatagttccagctatt

SEQ ID NO: 8784 - RNA, 20 nt, synthetic construct
  misc_feature 1..20: note = source = /note="Description of Artificial Sequence: Synthetic oligonucleotide"
  source 1..20: mol_type = other RNA
acctatagttccagctattt

SEQ ID NO: 8785 - RNA, 20 nt, synthetic construct
  misc_feature 1..20: note = source = /note="Description of Artificial Sequence: Synthetic oligonucleotide"
  source 1..20: mol_type = other RNA
tatagttccagctatttggg

SEQ ID NO: 8786 - RNA, 20 nt, synthetic construct
  misc_feature 1..20: note = source = /note="Description of Artificial Sequence: Synthetic oligonucleotide"
  source 1..20: mol_type = other RNA
tccagctatttgggaggctg

SEQ ID NO: 8787 - RNA, 20 nt, synthetic construct
  misc_feature 1..20: note = source = /note="Description of Artificial Sequence: Synthetic oligonucleotide"
  source 1..20: mol_type = other RNA
agctatttgggaggctgagg

SEQ ID NO: 8788 - RNA, 20 nt, synthetic construct
  misc_feature 1..20: note = source = /note="Description of Artificial Sequence: Synthetic oligonucleotide"
  source 1..20: mol_type = other RNA
gctatttgggaggctgaggc

SEQ ID NO: 8789 - RNA, 20 nt, synthetic construct
  misc_feature 1..20: note = source = /note="Description of Artificial Sequence: Synthetic oligonucleotide"
  source 1..20: mol_type = other RNA
tcacttgagcccagaagttc

SEQ ID NO: 8790 - RNA, 20 nt, synthetic construct
  misc_feature 1..20: note = source = /note="Description of Artificial Sequence: Synthetic oligonucleotide"
  source 1..20: mol_type = other RNA
agcattattaacataaaaat

SEQ ID NO: 8791 - RNA, 20 nt, synthetic construct
  misc_feature 1..20: note = source = /note="Description of Artificial Sequence: Synthetic oligonucleotide"
  source 1..20: mol_type = other RNA
ttcttagagaagttactgtt

SEQ ID NO: 8792 - RNA, 20 nt, synthetic construct
  misc_feature 1..20: note = source = /note="Description of Artificial Sequence: Synthetic oligonucleotide"
  source 1..20: mol_type = other RNA
tcttagagaagttactgtta

SEQ ID NO: 8793 - RNA, 20 nt, synthetic construct
  misc_feature 1..20: note = source = /note="Description of Artificial Sequence: Synthetic oligonucleotide"
  source 1..20: mol_type = other RNA
acagacagtgagtgactgaa

SEQ ID NO: 8794 - RNA, 20 nt, synthetic construct
  misc_feature 1..20: note = source = /note="Description of Artificial Sequence: Synthetic oligonucleotide"
  source 1..20: mol_type = other RNA
agtgactgaaaggcaaaatg

SEQ ID NO: 8795 - RNA, 20 nt, synthetic construct
  misc_feature 1..20: note = source = /note="Description of Artificial Sequence: Synthetic oligonucleotide"
  source 1..20: mol_type = other RNA
gtgactgaaaggcaaaatga

SEQ ID NO: 8796 - RNA, 20 nt, synthetic construct
  misc_feature 1..20: note = source = /note="Description of Artificial Sequence: Synthetic oligonucleotide"
  source 1..20: mol_type = other RNA
tgactgaaaggcaaaatgag

SEQ ID NO: 8797 - RNA, 20 nt, synthetic construct
  misc_feature 1..20: note = source = /note="Description of Artificial Sequence: Synthetic oligonucleotide"
  source 1..20: mol_type = other RNA
gcaaaatgaggggaaattcc

SEQ ID NO: 8798 - RNA, 20 nt, synthetic construct
  misc_feature 1..20: note = source = /note="Description of Artificial Sequence: Synthetic oligonucleotide"
  source 1..20: mol_type = other RNA
caaaatgaggggaaattcca

SEQ ID NO: 8799 - RNA, 20 nt, synthetic construct
  misc_feature 1..20: note = source = /note="Description of Artificial Sequence: Synthetic oligonucleotide"
  source 1..20: mol_type = other RNA
aaaatgaggggaaattccag

SEQ ID NO: 8800 - RNA, 20 nt, synthetic construct
  misc_feature 1..20: note = source = /note="Description of Artificial Sequence: Synthetic oligonucleotide"
  source 1..20: mol_type = other RNA
aaatattttgtttcttagtg

SEQ ID NO: 8801 - RNA, 20 nt, synthetic construct
  misc_feature 1..20: note = source = /note="Description of Artificial Sequence: Synthetic oligonucleotide"
  source 1..20: mol_type = other RNA
aatattttgtttcttagtgt

SEQ ID NO: 8802 - RNA, 20 nt, synthetic construct
  misc_feature 1..20: note = source = /note="Description of Artificial Sequence: Synthetic oligonucleotide"
  source 1..20: mol_type = other RNA
tagtgtgggttctacttaac

SEQ ID NO: 8803 - RNA, 20 nt, synthetic construct
  misc_feature 1..20: note = source = /note="Description of Artificial Sequence: Synthetic oligonucleotide"
  source 1..20: mol_type = other RNA
agtgtgggttctacttaact

SEQ ID NO: 8804 - RNA, 20 nt, synthetic construct
  misc_feature 1..20: note = source = /note="Description of Artificial Sequence: Synthetic oligonucleotide"
  source 1..20: mol_type = other RNA
aattgaaatagttctgtgtg

SEQ ID NO: 8805 - RNA, 20 nt, synthetic construct
  misc_feature 1..20: note = source = /note="Description of Artificial Sequence: Synthetic oligonucleotide"
  source 1..20: mol_type = other RNA
gctatccatagcaatgaatt

SEQ ID NO: 8806 - RNA, 20 nt, synthetic construct
  misc_feature 1..20: note = source = /note="Description of Artificial Sequence: Synthetic oligonucleotide"
  source 1..20: mol_type = other RNA
cttcacttactcttcattca

SEQ ID NO: 8807 - RNA, 20 nt, synthetic construct
  misc_feature 1..20: note = source = /note="Description of Artificial Sequence: Synthetic oligonucleotide"
  source 1..20: mol_type = other RNA
gcaaagaggggagaggccct

SEQ ID NO: 8808 - RNA, 20 nt, synthetic construct
  misc_feature 1..20: note = source = /note="Description of Artificial Sequence: Synthetic oligonucleotide"
  source 1..20: mol_type = other RNA
cgcaaagaggggagaggccc

SEQ ID NO: 8809 - RNA, 20 nt, synthetic construct
  misc_feature 1..20: note = source = /note="Description of Artificial Sequence: Synthetic oligonucleotide"
  source 1..20: mol_type = other RNA
agtggccgcaaagaggggag

SEQ ID NO: 8810 - RNA, 20 nt, synthetic construct
  misc_feature 1..20: note = source = /note="Description of Artificial Sequence: Synthetic oligonucleotide"
  source 1..20: mol_type = other RNA
ctatcagtggccgcaaagag

SEQ ID NO: 8811 - RNA, 20 nt, synthetic construct
  misc_feature 1..20: note = source = /note="Description of Artificial Sequence: Synthetic oligonucleotide"
  source 1..20: mol_type = other RNA
cctatcagtggccgcaaaga

SEQ ID NO: 8812 - RNA, 20 nt, synthetic construct
  misc_feature 1..20: note = source = /note="Description of Artificial Sequence: Synthetic oligonucleotide"
  source 1..20: mol_type = other RNA
tcctatcagtggccgcaaag

SEQ ID NO: 8813 - RNA, 20 nt, synthetic construct
  misc_feature 1..20: note = source = /note="Description of Artificial Sequence: Synthetic oligonucleotide"
  source 1..20: mol_type = other RNA
agattgggctttcctatcag

SEQ ID NO: 8814 - RNA, 20 nt, synthetic construct
  misc_feature 1..20: note = source = /note="Description of Artificial Sequence: Synthetic oligonucleotide"
  source 1..20: mol_type = other RNA
cttcctttcaaccaaagatt

SEQ ID NO: 8815 - RNA, 20 nt, synthetic construct
  misc_feature 1..20: note = source = /note="Description of Artificial Sequence: Synthetic oligonucleotide"
  source 1..20: mol_type = other RNA
tcttcctttcaaccaaagat

SEQ ID NO: 8816 - RNA, 20 nt, synthetic construct
  misc_feature 1..20: note = source = /note="Description of Artificial Sequence: Synthetic oligonucleotide"
  source 1..20: mol_type = other RNA
ttatcgcatgactgccaaac

SEQ ID NO: 8817 - RNA, 20 nt, synthetic construct
  misc_feature 1..20: note = source = /note="Description of Artificial Sequence: Synthetic oligonucleotide"
  source 1..20: mol_type = other RNA
ctctgactgctcctaattaa

SEQ ID NO: 8818 - RNA, 20 nt, synthetic construct
  misc_feature 1..20: note = source = /note="Description of Artificial Sequence: Synthetic oligonucleotide"
  source 1..20: mol_type = other RNA
atggtataactgaggccatg

SEQ ID NO: 8819 - RNA, 20 nt, synthetic construct
  misc_feature 1..20: note = source = /note="Description of Artificial Sequence: Synthetic oligonucleotide"
  source 1..20: mol_type = other RNA
tcaagtttatggtataactg

SEQ ID NO: 8820 - RNA, 20 nt, synthetic construct
  misc_feature 1..20: note = source = /note="Description of Artificial Sequence: Synthetic oligonucleotide"
  source 1..20: mol_type = other RNA
cataaacaatttcaagttta

SEQ ID NO: 8821 - RNA, 20 nt, synthetic construct
  misc_feature 1..20: note = source = /note="Description of Artificial Sequence: Synthetic oligonucleotide"
  source 1..20: mol_type = other RNA
aatatagtggccaggcacac

SEQ ID NO: 8822 - RNA, 20 nt, synthetic construct
  misc_feature 1..20: note = source = /note="Description of Artificial Sequence: Synthetic oligonucleotide"
  source 1..20: mol_type = other RNA
tacatactaatatagtggcc

SEQ ID NO: 8823 - RNA, 20 nt, synthetic construct
  misc_feature 1..20: note = source = /note="Description of Artificial Sequence: Synthetic oligonucleotide"
  source 1..20: mol_type = other RNA
gtcaatacatactaatatag

SEQ ID NO: 8824 - RNA, 20 nt, synthetic construct
  misc_feature 1..20: note = source = /note="Description of Artificial Sequence: Synthetic oligonucleotide"
  source 1..20: mol_type = other RNA
cagatactgcaacatggaag

SEQ ID NO: 8825 - RNA, 20 nt, synthetic construct
  misc_feature 1..20: note = source = /note="Description of Artificial Sequence: Synthetic oligonucleotide"
  source 1..20: mol_type = other RNA
ctgtttcagatactgcaaca

SEQ ID NO: 8826 - RNA, 20 nt, synthetic construct
  misc_feature 1..20: note = source = /note="Description of Artificial Sequence: Synthetic oligonucleotide"
  source 1..20: mol_type = other RNA
atatggaaggtatttgacct

SEQ ID NO: 8827 - RNA, 20 nt, synthetic construct
  misc_feature 1..20: note = source = /note="Description of Artificial Sequence: Synthetic oligonucleotide"
  source 1..20: mol_type = other RNA
catatggaaggtatttgacc

SEQ ID NO: 8828 - RNA, 20 nt, synthetic construct
  misc_feature 1..20: note = source = /note="Description of Artificial Sequence: Synthetic oligonucleotide"
  source 1..20: mol_type = other RNA
ttttgctacatacatatgga

SEQ ID NO: 8829 - RNA, 20 nt, synthetic construct
  misc_feature 1..20: note = source = /note="Description of Artificial Sequence: Synthetic oligonucleotide"
  source 1..20: mol_type = other RNA
ttgtttttgctacatacata

SEQ ID NO: 8830 - RNA, 20 nt, synthetic construct
  misc_feature 1..20: note = source = /note="Description of Artificial Sequence: Synthetic oligonucleotide"
  source 1..20: mol_type = other RNA
tctatttctacagaacttct

SEQ ID NO: 8831 - RNA, 20 nt, synthetic construct
  misc_feature 1..20: note = source = /note="Description of Artificial Sequence: Synthetic oligonucleotide"
  source 1..20: mol_type = other RNA
agcagttttgattactattg

SEQ ID NO: 8832 - RNA, 20 nt, synthetic construct
  misc_feature 1..20: note = source = /note="Description of Artificial Sequence: Synthetic oligonucleotide"
  source 1..20: mol_type = other RNA
attctaaattcttatattcc

SEQ ID NO: 8833 - RNA, 20 nt, synthetic construct
  misc_feature 1..20: note = source = /note="Description of Artificial Sequence: Synthetic oligonucleotide"
  source 1..20: mol_type = other RNA
taaaacaaaacattagcaac

SEQ ID NO: 8834 - RNA, 20 nt, synthetic construct
  misc_feature 1..20: note = source = /note="Description of Artificial Sequence: Synthetic oligonucleotide"
  source 1..20: mol_type = other RNA
tagacttcatgcaaagtgga

SEQ ID NO: 8835 - RNA, 20 nt, synthetic construct
  misc_feature 1..20: note = source = /note="Description of Artificial Sequence: Synthetic oligonucleotide"
  source 1..20: mol_type = other RNA
ggtttagacttcatgcaaag

SEQ ID NO: 8836 - RNA, 20 nt, synthetic construct
  misc_feature 1..20: note = source = /note="Description of Artificial Sequence: Synthetic oligonucleotide"
  source 1..20: mol_type = other RNA
atgaggctttttccaactga

SEQ ID NO: 8837 - RNA, 20 nt, synthetic construct
  misc_feature 1..20: note = source = /note="Description of Artificial Sequence: Synthetic oligonucleotide"
  source 1..20: mol_type = other RNA
gtagaggaatattaaaaatg

SEQ ID NO: 8838 - RNA, 20 nt, synthetic construct
  misc_feature 1..20: note = source = /note="Description of Artificial Sequence: Synthetic oligonucleotide"
  source 1..20: mol_type = other RNA
caggattatcagcacagtag

SEQ ID NO: 8839 - RNA, 20 nt, synthetic construct
  misc_feature 1..20: note = source = /note="Description of Artificial Sequence: Synthetic oligonucleotide"
  source 1..20: mol_type = other RNA
ctattcttttagtgttatac

SEQ ID NO: 8840 - RNA, 20 nt, synthetic construct
  misc_feature 1..20: note = source = /note="Description of Artificial Sequence: Synthetic oligonucleotide"
  source 1..20: mol_type = other RNA
cgcggtaacgtgaggtcgga

SEQ ID NO: 8841 - RNA, 20 nt, synthetic construct
  misc_feature 1..20: note = source = /note="Description of Artificial Sequence: Synthetic oligonucleotide"
  source 1..20: mol_type = other RNA
gcgcggtaacgtgaggtcgg

SEQ ID NO: 8842 - RNA, 20 nt, synthetic construct
  misc_feature 1..20: note = source = /note="Description of Artificial Sequence: Synthetic oligonucleotide"
  source 1..20: mol_type = other RNA
ttggaccctccacctccagc

SEQ ID NO: 8843 - RNA, 20 nt, synthetic construct
  misc_feature 1..20: note = source = /note="Description of Artificial Sequence: Synthetic oligonucleotide"
  source 1..20: mol_type = other RNA
gagaacttggaccctccacc

SEQ ID NO: 8844 - RNA, 20 nt, synthetic construct
  misc_feature 1..20: note = source = /note="Description of Artificial Sequence: Synthetic oligonucleotide"
  source 1..20: mol_type = other RNA
ttagagaacttggaccctcc

SEQ ID NO: 8845 - RNA, 20 nt, synthetic construct
  misc_feature 1..20: note = source = /note="Description of Artificial Sequence: Synthetic oligonucleotide"
  source 1..20: mol_type = other RNA
ctcttagagaacttggaccc

SEQ ID NO: 8846 - RNA, 20 nt, synthetic construct
  misc_feature 1..20: note = source = /note="Description of Artificial Sequence: Synthetic oligonucleotide"
  source 1..20: mol_type = other RNA
gtcctcttagagaacttgga

SEQ ID NO: 8847 - RNA, 20 nt, synthetic construct
  misc_feature 1..20: note = source = /note="Description of Artificial Sequence: Synthetic oligonucleotide"
  source 1..20: mol_type = other RNA
cgtcctcttagagaacttgg

SEQ ID NO: 8848 - RNA, 20 nt, synthetic construct
  misc_feature 1..20: note = source = /note="Description of Artificial Sequence: Synthetic oligonucleotide"
  source 1..20: mol_type = other RNA
cgatgatccctccgactccg

SEQ ID NO: 8849 - RNA, 20 nt, synthetic construct
  misc_feature 1..20: note = source = /note="Description of Artificial Sequence: Synthetic oligonucleotide"
  source 1..20: mol_type = other RNA
gggtcgatgatccctccgac

SEQ ID NO: 8850 - RNA, 20 nt, synthetic construct
  misc_feature 1..20: note = source = /note="Description of Artificial Sequence: Synthetic oligonucleotide"
  source 1..20: mol_type = other RNA
acattagggtcgatgatccc

SEQ ID NO: 8851 - RNA, 20 nt, synthetic construct
  misc_feature 1..20: note = source = /note="Description of Artificial Sequence: Synthetic oligonucleotide"
  source 1..20: mol_type = other RNA
cggacattagggtcgatgat

SEQ ID NO: 8852 - RNA, 20 nt, synthetic construct
  misc_feature 1..20: note = source = /note="Description of Artificial Sequence: Synthetic oligonucleotide"
  source 1..20: mol_type = other RNA
acggacattagggtcgatga

SEQ ID NO: 8853 - RNA, 20 nt, synthetic construct
  misc_feature 1..20: note = source = /note="Description of Artificial Sequence: Synthetic oligonucleotide"
  source 1..20: mol_type = other RNA
tgttttaatcggcccacacc

SEQ ID NO: 8854 - RNA, 20 nt, synthetic construct
  misc_feature 1..20: note = source = /note="Description of Artificial Sequence: Synthetic oligonucleotide"
  source 1..20: mol_type = other RNA
ttatgttttaatcggcccac

SEQ ID NO: 8855 - RNA, 20 nt, synthetic construct
  misc_feature 1..20: note = source = /note="Description of Artificial Sequence: Synthetic oligonucleotide"
  source 1..20: mol_type = other RNA
gatttttatgttttaatcgg

SEQ ID NO: 8856 - RNA, 20 nt, synthetic construct
  misc_feature 1..20: note = source = /note="Description of Artificial Sequence: Synthetic oligonucleotide"
  source 1..20: mol_type = other RNA
tgatttttatgttttaatcg

SEQ ID NO: 8857 - RNA, 20 nt, synthetic construct
  misc_feature 1..20: note = source = /note="Description of Artificial Sequence: Synthetic oligonucleotide"
  source 1..20: mol_type = other RNA
gctctggtcggactggttgt

SEQ ID NO: 8858 - RNA, 20 nt, synthetic construct
  misc_feature 1..20: note = source = /note="Description of Artificial Sequence: Synthetic oligonucleotide"
  source 1..20: mol_type = other RNA
cacccgttagtggactccag

SEQ ID NO: 8859 - RNA, 20 nt, synthetic construct
  misc_feature 1..20: note = source = /note="Description of Artificial Sequence: Synthetic oligonucleotide"
  source 1..20: mol_type = other RNA
ccacccgttagtggactcca

SEQ ID NO: 8860 - RNA, 20 nt, synthetic construct
  misc_feature 1..20: note = source = /note="Description of Artificial Sequence: Synthetic oligonucleotide"
  source 1..20: mol_type = other RNA
ggctccacccgttagtggac

SEQ ID NO: 8861 - RNA, 20 nt, synthetic construct
  misc_feature 1..20: note = source = /note="Description of Artificial Sequence: Synthetic oligonucleotide"
  source 1..20: mol_type = other RNA
cgtgaaaccctccggctcca

SEQ ID NO: 8862 - RNA, 20 nt, synthetic construct
  misc_feature 1..20: note = source = /note="Description of Artificial Sequence: Synthetic oligonucleotide"
  source 1..20: mol_type = other RNA
ccgtgaaaccctccggctcc

SEQ ID NO: 8863 - RNA, 20 nt, synthetic construct
  misc_feature 1..20: note = source = /note="Description of Artificial Sequence: Synthetic oligonucleotide"
  source 1..20: mol_type = other RNA
attccgtgaaaccctccggc

SEQ ID NO: 8864 - RNA, 20 nt, synthetic construct
  misc_feature 1..20: note = source = /note="Description of Artificial Sequence: Synthetic oligonucleotide"
  source 1..20: mol_type = other RNA
acggacattccgtgaaaccc

SEQ ID NO: 8865 - RNA, 20 nt, synthetic construct
  misc_feature 1..20: note = source = /note="Description of Artificial Sequence: Synthetic oligonucleotide"
  source 1..20: mol_type = other RNA
agtacggacattccgtgaaa

SEQ ID NO: 8866 - RNA, 20 nt, synthetic construct
  misc_feature 1..20: note = source = /note="Description of Artificial Sequence: Synthetic oligonucleotide"
  source 1..20: mol_type = other RNA
gagtacggacattccgtgaa

SEQ ID NO: 8867 - RNA, 20 nt, synthetic construct
  misc_feature 1..20: note = source = /note="Description of Artificial Sequence: Synthetic oligonucleotide"
  source 1..20: mol_type = other RNA
gcgccgccgagtacggacat

SEQ ID NO: 8868 - RNA, 20 nt, synthetic construct
  misc_feature 1..20: note = source = /note="Description of Artificial Sequence: Synthetic oligonucleotide"
  source 1..20: mol_type = other RNA
agatttctccggtccgcgcc

SEQ ID NO: 8869 - RNA, 20 nt, synthetic construct
  misc_feature 1..20: note = source = /note="Description of Artificial Sequence: Synthetic oligonucleotide"
  source 1..20: mol_type = other RNA
gtaagatttctccggtccgc

SEQ ID NO: 8870 - RNA, 20 nt, synthetic construct
  misc_feature 1..20: note = source = /note="Description of Artificial Sequence: Synthetic oligonucleotide"
  source 1..20: mol_type = other RNA
aacttgtaagatttctccgg

SEQ ID NO: 8871 - RNA, 20 nt, synthetic construct
  misc_feature 1..20: note = source = /note="Description of Artificial Sequence: Synthetic oligonucleotide"
  source 1..20: mol_type = other RNA
aaaataacttgtaagatttc

SEQ ID NO: 8872 - RNA, 20 nt, synthetic construct
  misc_feature 1..20: note = source = /note="Description of Artificial Sequence: Synthetic oligonucleotide"
  source 1..20: mol_type = other RNA
attattttaaaaccaatcgt

SEQ ID NO: 8873 - RNA, 20 nt, synthetic construct
  misc_feature 1..20: note = source = /note="Description of Artificial Sequence: Synthetic oligonucleotide"
  source 1..20: mol_type = other RNA
aattattttaaaaccaatcg

SEQ ID NO: 8874 - RNA, 20 nt, synthetic construct
  misc_feature 1..20: note = source = /note="Description of Artificial Sequence: Synthetic oligonucleotide"
  source 1..20: mol_type = other RNA
tgcagagaaaaagacactaa

SEQ ID NO: 8875 - RNA, 20 nt, synthetic construct
  misc_feature 1..20: note = source = /note="Description of Artificial Sequence: Synthetic oligonucleotide"
  source 1..20: mol_type = other RNA
caaatgattctatagtttgg

SEQ ID NO: 8876 - RNA, 20 nt, synthetic construct
  misc_feature 1..20: note = source = /note="Description of Artificial Sequence: Synthetic oligonucleotide"
  source 1..20: mol_type = other RNA
cagcaaatgattctatagtt

SEQ ID NO: 8877 - RNA, 20 nt, synthetic construct
  misc_feature 1..20: note = source = /note="Description of Artificial Sequence: Synthetic oligonucleotide"
  source 1..20: mol_type = other RNA
taaacagcaaaggacaaatt

SEQ ID NO: 8878 - RNA, 20 nt, synthetic construct
  misc_feature 1..20: note = source = /note="Description of Artificial Sequence: Synthetic oligonucleotide"
  source 1..20: mol_type = other RNA
gttagagttttaaacagcaa

SEQ ID NO: 8879 - RNA, 20 nt, synthetic construct
  misc_feature 1..20: note = source = /note="Description of Artificial Sequence: Synthetic oligonucleotide"
  source 1..20: mol_type = other RNA
ggtacacaccataaaatttt

SEQ ID NO: 8880 - RNA, 20 nt, synthetic construct
  misc_feature 1..20: note = source = /note="Description of Artificial Sequence: Synthetic oligonucleotide"
  source 1..20: mol_type = other RNA
aatcatttgtaaaagtggtc

SEQ ID NO: 8881 - RNA, 20 nt, synthetic construct
  misc_feature 1..20: note = source = /note="Description of Artificial Sequence: Synthetic oligonucleotide"
  source 1..20: mol_type = other RNA
caattaatcatttgtaaaag

SEQ ID NO: 8882 - RNA, 20 nt, synthetic construct
  misc_feature 1..20: note = source = /note="Description of Artificial Sequence: Synthetic oligonucleotide"
  source 1..20: mol_type = other RNA
cgtggtaacgtgaggtcgga

SEQ ID NO: 8883 - RNA, 20 nt, synthetic construct
  misc_feature 1..20: note = source = /note="Description of Artificial Sequence: Synthetic oligonucleotide"
  source 1..20: mol_type = other RNA
gcgtggtaacgtgaggtcgg

SEQ ID NO: 8884 - RNA, 20 nt, synthetic construct
  misc_feature 1..20: note = source = /note="Description of Artificial Sequence: Synthetic oligonucleotide"
  source 1..20: mol_type = other RNA
acgaacttgggtcctctacc

SEQ ID NO: 8885 - RNA, 20 nt, synthetic construct
  misc_feature 1..20: note = source = /note="Description of Artificial Sequence: Synthetic oligonucleotide"
  source 1..20: mol_type = other RNA
ttaacgaacttgggtcctct

SEQ ID NO: 8886 - RNA, 20 nt, synthetic construct
  misc_feature 1..20: note = source = /note="Description of Artificial Sequence: Synthetic oligonucleotide"
  source 1..20: mol_type = other RNA
gtcctcttaacgaacttggg

SEQ ID NO: 8887 - RNA, 20 nt, synthetic construct
  misc_feature 1..20: note = source = /note="Description of Artificial Sequence: Synthetic oligonucleotide"
  source 1..20: mol_type = other RNA
cgataagccctccgactccg

SEQ ID NO: 8888 - RNA, 20 nt, synthetic construct
  misc_feature 1..20: note = source = /note="Description of Artificial Sequence: Synthetic oligonucleotide"
  source 1..20: mol_type = other RNA
gggtcgataagccctccgac

SEQ ID NO: 8889 - RNA, 20 nt, synthetic construct
  misc_feature 1..20: note = source = /note="Description of Artificial Sequence: Synthetic oligonucleotide"
  source 1..20: mol_type = other RNA
acattagggtcgataagccc

SEQ ID NO: 8890 - RNA, 20 nt, synthetic construct
  misc_feature 1..20: note = source = /note="Description of Artificial Sequence: Synthetic oligonucleotide"
  source 1..20: mol_type = other RNA
cggacattagggtcgataag

SEQ ID NO: 8891 - RNA, 20 nt, synthetic construct
  misc_feature 1..20: note = source = /note="Description of Artificial Sequence: Synthetic oligonucleotide"
  source 1..20: mol_type = other RNA
acggacattagggtcgataa

SEQ ID NO: 8892 - RNA, 20 nt, synthetic construct
  misc_feature 1..20: note = source = /note="Description of Artificial Sequence: Synthetic oligonucleotide"
  source 1..20: mol_type = other RNA
ttatgttttaatcgacccac

SEQ ID NO: 8893 - RNA, 20 nt, synthetic construct
  misc_feature 1..20: note = source = /note="Description of Artificial Sequence: Synthetic oligonucleotide"
  source 1..20: mol_type = other RNA
gatttttatgttttaatcga

SEQ ID NO: 8894 - RNA, 20 nt, synthetic construct
  misc_feature 1..20: note = source = /note="Description of Artificial Sequence: Synthetic oligonucleotide"
  source 1..20: mol_type = other RNA
tgatttttatgttttaatcg

SEQ ID NO: 8895 - RNA, 20 nt, synthetic construct
  misc_feature 1..20: note = source = /note="Description of Artificial Sequence: Synthetic oligonucleotide"
  source 1..20: mol_type = other RNA
ggtctggtcggactagttgt

SEQ ID NO: 8896 - RNA, 20 nt, synthetic construct
  misc_feature 1..20: note = source = /note="Description of Artificial Sequence: Synthetic oligonucleotide"
  source 1..20: mol_type = other RNA
gcccgcctagtgggctccag

SEQ ID NO: 8897 - RNA, 20 nt, synthetic construct
  misc_feature 1..20: note = source = /note="Description of Artificial Sequence: Synthetic oligonucleotide"
  source 1..20: mol_type = other RNA
gctccgcccgcctagtgggc

SEQ ID NO: 8898 - RNA, 20 nt, synthetic construct
  misc_feature 1..20: note = source = /note="Description of Artificial Sequence: Synthetic oligonucleotide"
  source 1..20: mol_type = other RNA
gagaccctccggctccgccc

SEQ ID NO: 8899 - RNA, 20 nt, synthetic construct
  misc_feature 1..20: note = source = /note="Description of Artificial Sequence: Synthetic oligonucleotide"
  source 1..20: mol_type = other RNA
cgtgagaccctccggctccg

SEQ ID NO: 8900 - RNA, 20 nt, synthetic construct
  misc_feature 1..20: note = source = /note="Description of Artificial Sequence: Synthetic oligonucleotide"
  source 1..20: mol_type = other RNA
tcgtgagaccctccggctcc

SEQ ID NO: 8901 - RNA, 20 nt, synthetic construct
  misc_feature 1..20: note = source = /note="Description of Artificial Sequence: Synthetic oligonucleotide"
  source 1..20: mol_type = other RNA
gggtcgtgagaccctccggc

SEQ ID NO: 8902 - RNA, 20 nt, synthetic construct
  misc_feature 1..20: note = source = /note="Description of Artificial Sequence: Synthetic oligonucleotide"
  source 1..20: mol_type = other RNA
acattagggtcgtgagaccc

SEQ ID NO: 8903 - RNA, 20 nt, synthetic construct
  misc_feature 1..20: note = source = /note="Description of Artificial Sequence: Synthetic oligonucleotide"
  source 1..20: mol_type = other RNA
cggacattagggtcgtgaga

SEQ ID NO: 8904 - RNA, 20 nt, synthetic construct
  misc_feature 1..20: note = source = /note="Description of Artificial Sequence: Synthetic oligonucleotide"
  source 1..20: mol_type = other RNA
acggacattagggtcgtgag

SEQ ID NO: 8905 - RNA, 20 nt, synthetic construct
  misc_feature 1..20: note = source = /note="Description of Artificial Sequence: Synthetic oligonucleotide"
  source 1..20: mol_type = other RNA
atatttcaccgacccgtgtc

SEQ ID NO: 8906 - RNA, 20 nt, synthetic construct
  misc_feature 1..20: note = source = /note="Description of Artificial Sequence: Synthetic oligonucleotide"
  source 1..20: mol_type = other RNA
ttaaaaaaatatttcaccga

SEQ ID NO: 8907 - RNA, 20 nt, synthetic construct
  misc_feature 1..20: note = source = /note="Description of Artificial Sequence: Synthetic oligonucleotide"
  source 1..20: mol_type = other RNA
attaaaaaaatatttcaccg

SEQ ID NO: 8908 - RNA, 20 nt, synthetic construct
  misc_feature 1..20: note = source = /note="Description of Artificial Sequence: Synthetic oligonucleotide"
  source 1..20: mol_type = other RNA
gtagattaaaaaaatatttc

SEQ ID NO: 8909 - RNA, 20 nt, synthetic construct
  misc_feature 1..20: note = source = /note="Description of Artificial Sequence: Synthetic oligonucleotide"
  source 1..20: mol_type = other RNA
agaaagagcaagaggagtca

SEQ ID NO: 8910 - RNA, 20 nt, synthetic construct
  misc_feature 1..20: note = source = /note="Description of Artificial Sequence: Synthetic oligonucleotide"
  source 1..20: mol_type = other RNA
cagaaagagcaagaggagtc

SEQ ID NO: 8911 - RNA, 20 nt, synthetic construct
  misc_feature 1..20: note = source = /note="Description of Artificial Sequence: Synthetic oligonucleotide"
  source 1..20: mol_type = other RNA
ttttcttcagaaagagcaag

SEQ ID NO: 8912 - RNA, 20 nt, synthetic construct
  misc_feature 1..20: note = source = /note="Description of Artificial Sequence: Synthetic oligonucleotide"
  source 1..20: mol_type = other RNA
ttaattttttttctaattaa

SEQ ID NO: 8913 - RNA, 20 nt, synthetic construct
  misc_feature 1..20: note = source = /note="Description of Artificial Sequence: Synthetic oligonucleotide"
  source 1..20: mol_type = other RNA
aaaactatcattttcacaag

SEQ ID NO: 8914 - RNA, 20 nt, synthetic construct
  misc_feature 1..20: note = source = /note="Description of Artificial Sequence: Synthetic oligonucleotide"
  source 1..20: mol_type = other RNA
aaaatcaaacattttgcaat

SEQ ID NO: 8915 - RNA, 20 nt, synthetic construct
  misc_feature 1..20: note = source = /note="Description of Artificial Sequence: Synthetic oligonucleotide"
  source 1..20: mol_type = other RNA
atgaatgaaatatagtttcc

SEQ ID NO: 8916 - RNA, 20 nt, synthetic construct
  misc_feature 1..20: note = source = /note="Description of Artificial Sequence: Synthetic oligonucleotide"
  source 1..20: mol_type = other RNA
ttgggccctccacctccaac

SEQ ID NO: 8917 - RNA, 20 nt, synthetic construct
  misc_feature 1..20: note = source = /note="Description of Artificial Sequence: Synthetic oligonucleotide"
  source 1..20: mol_type = other RNA
gtgaacttgggccctccacc

SEQ ID NO: 8918 - RNA, 20 nt, synthetic construct
  misc_feature 1..20: note = source = /note="Description of Artificial Sequence: Synthetic oligonucleotide"
  source 1..20: mol_type = other RNA
ttagtgaacttgggccctcc

SEQ ID NO: 8919 - RNA, 20 nt, synthetic construct
  misc_feature 1..20: note = source = /note="Description of Artificial Sequence: Synthetic oligonucleotide"
  source 1..20: mol_type = other RNA
ctcttagtgaacttgggccc

SEQ ID NO: 8920 - RNA, 20 nt, synthetic construct
  misc_feature 1..20: note = source = /note="Description of Artificial Sequence: Synthetic oligonucleotide"
  source 1..20: mol_type = other RNA
gtactcttagtgaacttggg

SEQ ID NO: 8921 - RNA, 20 nt, synthetic construct
  misc_feature 1..20: note = source = /note="Description of Artificial Sequence: Synthetic oligonucleotide"
  source 1..20: mol_type = other RNA
cgtactcttagtgaacttgg

SEQ ID NO: 8922 - RNA, 20 nt, synthetic construct
  misc_feature 1..20: note = source = /note="Description of Artificial Sequence: Synthetic oligonucleotide"
  source 1..20: mol_type = other RNA
agatcgatgagccctccgac

SEQ ID NO: 8923 - RNA, 20 nt, synthetic construct
  misc_feature 1..20: note = source = /note="Description of Artificial Sequence: Synthetic oligonucleotide"
  source 1..20: mol_type = other RNA
acattaagatcgatgagccc

SEQ ID NO: 8924 - RNA, 20 nt, synthetic construct
  misc_feature 1..20: note = source = /note="Description of Artificial Sequence: Synthetic oligonucleotide"
  source 1..20: mol_type = other RNA
cggacattaagatcgatgag

SEQ ID NO: 8925 - RNA, 20 nt, synthetic construct
  misc_feature 1..20: note = source = /note="Description of Artificial Sequence: Synthetic oligonucleotide"
  source 1..20: mol_type = other RNA
acggacattaagatcgatga

SEQ ID NO: 8926 - RNA, 20 nt, synthetic construct
  misc_feature 1..20: note = source = /note="Description of Artificial Sequence: Synthetic oligonucleotide"
  source 1..20: mol_type = other RNA
ttatgtttttactcggccca

SEQ ID NO: 8927 - RNA, 20 nt, synthetic construct
  misc_feature 1..20: note = source = /note="Description of Artificial Sequence: Synthetic oligonucleotide"
  source 1..20: mol_type = other RNA
tttatgtttttactcggccc

SEQ ID NO: 8928 - RNA, 20 nt, synthetic construct
  misc_feature 1..20: note = source = /note="Description of Artificial Sequence: Synthetic oligonucleotide"
  source 1..20: mol_type = other RNA
atttttatgtttttactcgg

SEQ ID NO: 8929 - RNA, 20 nt, synthetic construct
  misc_feature 1..20: note = source = /note="Description of Artificial Sequence: Synthetic oligonucleotide"
  source 1..20: mol_type = other RNA
gatttttatgtttttactcg

SEQ ID NO: 8930 - RNA, 20 nt, synthetic construct
  misc_feature 1..20: note = source = /note="Description of Artificial Sequence: Synthetic oligonucleotide"
  source 1..20: mol_type = other RNA
gctctagttagaccggttgt

SEQ ID NO: 8931 - RNA, 20 nt, synthetic construct
  misc_feature 1..20: note = source = /note="Description of Artificial Sequence: Synthetic oligonucleotide"
  source 1..20: mol_type = other RNA
ggtcctcaagctctagttag

SEQ ID NO: 8932 - RNA, 20 nt, synthetic construct
  misc_feature 1..20: note = source = /note="Description of Artificial Sequence: Synthetic oligonucleotide"
  source 1..20: mol_type = other RNA
acccacccaatggacttcgg

SEQ ID NO: 8933 - RNA, 20 nt, synthetic construct
  misc_feature 1..20: note = source = /note="Description of Artificial Sequence: Synthetic oligonucleotide"
  source 1..20: mol_type = other RNA
aaaccctccggtcccaccca

SEQ ID NO: 8934 - RNA, 20 nt, synthetic construct
  misc_feature 1..20: note = source = /note="Description of Artificial Sequence: Synthetic oligonucleotide"
  source 1..20: mol_type = other RNA
gaaaccctccggtcccaccc

SEQ ID NO: 8935 - RNA, 20 nt, synthetic construct
  misc_feature 1..20: note = source = /note="Description of Artificial Sequence: Synthetic oligonucleotide"
  source 1..20: mol_type = other RNA
cgtgaaaccctccggtccca

SEQ ID NO: 8936 - RNA, 20 nt, synthetic construct
  misc_feature 1..20: note = source = /note="Description of Artificial Sequence: Synthetic oligonucleotide"
  source 1..20: mol_type = other RNA
tcgtgaaaccctccggtccc

SEQ ID NO: 8937 - RNA, 20 nt, synthetic construct
  misc_feature 1..20: note = source = /note="Description of Artificial Sequence: Synthetic oligonucleotide"
  source 1..20: mol_type = other RNA
gggtcgtgaaaccctccggt

SEQ ID NO: 8938 - RNA, 20 nt, synthetic construct
  misc_feature 1..20: note = source = /note="Description of Artificial Sequence: Synthetic oligonucleotide"
  source 1..20: mol_type = other RNA
agggtcgtgaaaccctccgg

SEQ ID NO: 8939 - RNA, 20 nt, synthetic construct
  misc_feature 1..20: note = source = /note="Description of Artificial Sequence: Synthetic oligonucleotide"
  source 1..20: mol_type = other RNA
acattagggtcgtgaaaccc

SEQ ID NO: 8940 - RNA, 20 nt, synthetic construct
  misc_feature 1..20: note = source = /note="Description of Artificial Sequence: Synthetic oligonucleotide"
  source 1..20: mol_type = other RNA
tggacattagggtcgtgaaa

SEQ ID NO: 8941 - RNA, 20 nt, synthetic construct
  misc_feature 1..20: note = source = /note="Description of Artificial Sequence: Synthetic oligonucleotide"
  source 1..20: mol_type = other RNA
gtggacattagggtcgtgaa

SEQ ID NO: 8942 - RNA, 20 nt, synthetic construct
  misc_feature 1..20: note = source = /note="Description of Artificial Sequence: Synthetic oligonucleotide"
  source 1..20: mol_type = other RNA
gaaaagctccgacccgtacc

SEQ ID NO: 8943 - RNA, 20 nt, synthetic construct
  misc_feature 1..20: note = source = /note="Description of Artificial Sequence: Synthetic oligonucleotide"
  source 1..20: mol_type = other RNA
atggaaaagctccgacccgt

SEQ ID NO: 8944 - RNA, 20 nt, synthetic construct
  misc_feature 1..20: note = source = /note="Description of Artificial Sequence: Synthetic oligonucleotide"
  source 1..20: mol_type = other RNA
gaattatggaaaagctccga

SEQ ID NO: 8945 - RNA, 20 nt, synthetic construct
  misc_feature 1..20: note = source = /note="Description of Artificial Sequence: Synthetic oligonucleotide"
  source 1..20: mol_type = other RNA
agaattatggaaaagctccg

SEQ ID NO: 8946 - RNA, 20 nt, synthetic construct
  misc_feature 1..20: note = source = /note="Description of Artificial Sequence: Synthetic oligonucleotide"
  source 1..20: mol_type = other RNA
tataagaattatggaaaagc

SEQ ID NO: 8947 - RNA, 20 nt, synthetic construct
  misc_feature 1..20: note = source = /note="Description of Artificial Sequence: Synthetic oligonucleotide"
  source 1..20: mol_type = other RNA
attggcatttataagaatta

SEQ ID NO: 8948 - RNA, 20 nt, synthetic construct
  misc_feature 1..20: note = source = /note="Description of Artificial Sequence: Synthetic oligonucleotide"
  source 1..20: mol_type = other RNA
tcagattccatttcaggcat

SEQ ID NO: 8949 - RNA, 20 nt, synthetic construct
  misc_feature 1..20: note = source = /note="Description of Artificial Sequence: Synthetic oligonucleotide"
  source 1..20: mol_type = other RNA
tatatgtcagattccatttc

SEQ ID NO: 8950 - RNA, 20 nt, synthetic construct
  misc_feature 1..20: note = source = /note="Description of Artificial Sequence: Synthetic oligonucleotide"
  source 1..20: mol_type = other RNA
tctggtccaactatttttca

SEQ ID NO: 8951 - RNA, 20 nt, synthetic construct
  misc_feature 1..20: note = source = /note="Description of Artificial Sequence: Synthetic oligonucleotide"
  source 1..20: mol_type = other RNA
ctacaagctttctgagactc

SEQ ID NO: 8952 - RNA, 20 nt, synthetic construct
  misc_feature 1..20: note = source = /note="Description of Artificial Sequence: Synthetic oligonucleotide"
  source 1..20: mol_type = other RNA
agtattaaaattttttattt

SEQ ID NO: 8953 - RNA, 20 nt, synthetic construct
  misc_feature 1..20: note = source = /note="Description of Artificial Sequence: Synthetic oligonucleotide"
  source 1..20: mol_type = other RNA
agtaaagtctgtattgacat

SEQ ID NO: 8954 - RNA, 20 nt, synthetic construct
  misc_feature 1..20: note = source = /note="Description of Artificial Sequence: Synthetic oligonucleotide"
  source 1..20: mol_type = other RNA
taaaataaaatctatttatg

SEQ ID NO: 8955 - RNA, 20 nt, synthetic construct
  misc_feature 1..20: note = source = /note="Description of Artificial Sequence: Synthetic oligonucleotide"
  source 1..20: mol_type = other RNA
ataaaataaaatctatttat

SEQ ID NO: 8956 - RNA, 20 nt, synthetic construct
  misc_feature 1..20: note = source = /note="Description of Artificial Sequence: Synthetic oligonucleotide"
  source 1..20: mol_type = other RNA
cataaaataaaatctattta

SEQ ID NO: 8957 - RNA, 20 nt, synthetic construct
  misc_feature 1..20: note = source = /note="Description of Artificial Sequence: Synthetic oligonucleotide"
  source 1..20: mol_type = other RNA
attattctattctctgttct

SEQ ID NO: 8958 - RNA, 20 nt, synthetic construct
  misc_feature 1..20: note = source = /note="Description of Artificial Sequence: Synthetic oligonucleotide"
  source 1..20: mol_type = other RNA
tttgtaagaactcagtgatg

SEQ ID NO: 8959 - RNA, 20 nt, synthetic construct
  misc_feature 1..20: note = source = /note="Description of Artificial Sequence: Synthetic oligonucleotide"
  source 1..20: mol_type = other RNA
gtttggagcatgtggacaca

SEQ ID NO: 8960 - RNA, 20 nt, synthetic construct
  misc_feature 1..20: note = source = /note="Description of Artificial Sequence: Synthetic oligonucleotide"
  source 1..20: mol_type = other RNA
ggtttggagcatgtggacac

SEQ ID NO: 8961 - RNA, 20 nt, synthetic construct
  misc_feature 1..20: note = source = /note="Description of Artificial Sequence: Synthetic oligonucleotide"
  source 1..20: mol_type = other RNA
agtgggtggtttggagcatg

SEQ ID NO: 8962 - RNA, 20 nt, synthetic construct
  misc_feature 1..20: note = source = /note="Description of Artificial Sequence: Synthetic oligonucleotide"
  source 1..20: mol_type = other RNA
tgaactcacagtgggtggtt

SEQ ID NO: 8963 - RNA, 20 nt, synthetic construct
  misc_feature 1..20: note = source = /note="Description of Artificial Sequence: Synthetic oligonucleotide"
  source 1..20: mol_type = other RNA
ttttctgaactcacagtggg

SEQ ID NO: 8964 - RNA, 20 nt, synthetic construct
  misc_feature 1..20: note = source = /note="Description of Artificial Sequence: Synthetic oligonucleotide"
  source 1..20: mol_type = other RNA
ttcttttctgaactcacagt

SEQ ID NO: 8965 - RNA, 20 nt, synthetic construct
  misc_feature 1..20: note = source = /note="Description of Artificial Sequence: Synthetic oligonucleotide"
  source 1..20: mol_type = other RNA
gttcttttctgaactcacag

SEQ ID NO: 8966 - RNA, 20 nt, synthetic construct
  misc_feature 1..20: note = source = /note="Description of Artificial Sequence: Synthetic oligonucleotide"
  source 1..20: mol_type = other RNA
aaacagctggtttggctcaa

SEQ ID NO: 8967 - RNA, 20 nt, synthetic construct
  misc_feature 1..20: note = source = /note="Description of Artificial Sequence: Synthetic oligonucleotide"
  source 1..20: mol_type = other RNA
taaagaagaaacagctggtt

SEQ ID NO: 8968 - RNA, 20 nt, synthetic construct
  misc_feature 1..20: note = source = /note="Description of Artificial Sequence: Synthetic oligonucleotide"
  source 1..20: mol_type = other RNA
atctttaaagaagaaacagc

SEQ ID NO: 8969 - RNA, 20 nt, synthetic construct
  misc_feature 1..20: note = source = /note="Description of Artificial Sequence: Synthetic oligonucleotide"
  source 1..20: mol_type = other RNA
cataaaatggaaatctcaaa

SEQ ID NO: 8970 - RNA, 20 nt, synthetic construct
  misc_feature 1..20: note = source = /note="Description of Artificial Sequence: Synthetic oligonucleotide"
  source 1..20: mol_type = other RNA
tcataaaatggaaatctcaa

SEQ ID NO: 8971 - RNA, 20 nt, synthetic construct
  misc_feature 1..20: note = source = /note="Description of Artificial Sequence: Synthetic oligonucleotide"
  source 1..20: mol_type = other RNA
ggttagacttagtcataaaa

SEQ ID NO: 8972 - RNA, 20 nt, synthetic construct
  misc_feature 1..20: note = source = /note="Description of Artificial Sequence: Synthetic oligonucleotide"
  source 1..20: mol_type = other RNA
cttacttgccaaaaaaatac

SEQ ID NO: 8973 - RNA, 20 nt, synthetic construct
  misc_feature 1..20: note = source = /note="Description of Artificial Sequence: Synthetic oligonucleotide"
  source 1..20: mol_type = other RNA
accatggcagaaggcatttc

SEQ ID NO: 8974 - RNA, 20 nt, synthetic construct
  misc_feature 1..20: note = source = /note="Description of Artificial Sequence: Synthetic oligonucleotide"
  source 1..20: mol_type = other RNA
acatcacccaccatggcaga

SEQ ID NO: 8975 - RNA, 20 nt, synthetic construct
  misc_feature 1..20: note = source = /note="Description of Artificial Sequence: Synthetic oligonucleotide"
  source 1..20: mol_type = other RNA
atgtttaacatcacccacca

SEQ ID NO: 8976 - RNA, 20 nt, synthetic construct
  misc_feature 1..20: note = source = /note="Description of Artificial Sequence: Synthetic oligonucleotide"
  source 1..20: mol_type = other RNA
ctacgacacactacccaggt

SEQ ID NO: 8977 - RNA, 20 nt, synthetic construct
  misc_feature 1..20: note = source = /note="Description of Artificial Sequence: Synthetic oligonucleotide"
  source 1..20: mol_type = other RNA
tttataactacgacacacta

SEQ ID NO: 8978 - RNA, 20 nt, synthetic construct
  misc_feature 1..20: note = source = /note="Description of Artificial Sequence: Synthetic oligonucleotide"
  source 1..20: mol_type = other RNA
atttataactacgacacact

SEQ ID NO: 8979 - RNA, 20 nt, synthetic construct
  misc_feature 1..20: note = source = /note="Description of Artificial Sequence: Synthetic oligonucleotide"
  source 1..20: mol_type = other RNA
tgtgatcaccctcacctaca

SEQ ID NO: 8980 - RNA, 20 nt, synthetic construct
  misc_feature 1..20: note = source = /note="Description of Artificial Sequence: Synthetic oligonucleotide"
  source 1..20: mol_type = other RNA
ttgtgatcaccctcacctac

SEQ ID NO: 8981 - RNA, 20 nt, synthetic construct
  misc_feature 1..20: note = source = /note="Description of Artificial Sequence: Synthetic oligonucleotide"
  source 1..20: mol_type = other RNA
gaaagtttgtgatcaccctc

SEQ ID NO: 8982 - RNA, 20 nt, synthetic construct
  misc_feature 1..20: note = source = /note="Description of Artificial Sequence: Synthetic oligonucleotide"
  source 1..20: mol_type = other RNA
aagacgaaagtttgtgatca

SEQ ID NO: 8983 - RNA, 20 nt, synthetic construct
  misc_feature 1..20: note = source = /note="Description of Artificial Sequence: Synthetic oligonucleotide"
  source 1..20: mol_type = other RNA
gaagacgaaagtttgtgatc

SEQ ID NO: 8984 - RNA, 20 nt, synthetic construct
  misc_feature 1..20: note = source = /note="Description of Artificial Sequence: Synthetic oligonucleotide"
  source 1..20: mol_type = other RNA
actttacaattgtccattct

SEQ ID NO: 8985 - RNA, 20 nt, synthetic construct
  misc_feature 1..20: note = source = /note="Description of Artificial Sequence: Synthetic oligonucleotide"
  source 1..20: mol_type = other RNA
tatgtaggactttacaattg

SEQ ID NO: 8986 - RNA, 20 nt, synthetic construct
  misc_feature 1..20: note = source = /note="Description of Artificial Sequence: Synthetic oligonucleotide"
  source 1..20: mol_type = other RNA
cttcacagttagtacacctt

SEQ ID NO: 8987 - RNA, 20 nt, synthetic construct
  misc_feature 1..20: note = source = /note="Description of Artificial Sequence: Synthetic oligonucleotide"
  source 1..20: mol_type = other RNA
tcttcacagttagtacacct

SEQ ID NO: 8988 - RNA, 20 nt, synthetic construct
  misc_feature 1..20: note = source = /note="Description of Artificial Sequence: Synthetic oligonucleotide"
  source 1..20: mol_type = other RNA
tgagtcttcacagttagtac

SEQ ID NO: 8989 - RNA, 20 nt, synthetic construct
  misc_feature 1..20: note = source = /note="Description of Artificial Sequence: Synthetic oligonucleotide"
  source 1..20: mol_type = other RNA
ggtctgttacctgtacttga

SEQ ID NO: 8990 - RNA, 20 nt, synthetic construct
  misc_feature 1..20: note = source = /note="Description of Artificial Sequence: Synthetic oligonucleotide"
  source 1..20: mol_type = other RNA
gggtctgttacctgtacttg

SEQ ID NO: 8991 - RNA, 20 nt, synthetic construct
  misc_feature 1..20: note = source = /note="Description of Artificial Sequence: Synthetic oligonucleotide"
  source 1..20: mol_type = other RNA
aattatcgatagggtctgtt

SEQ ID NO: 8992 - RNA, 20 nt, synthetic construct
  misc_feature 1..20: note = source = /note="Description of Artificial Sequence: Synthetic oligonucleotide"
  source 1..20: mol_type = other RNA
ttacctctcttaaaatactc

SEQ ID NO: 8993 - RNA, 20 nt, synthetic construct
  misc_feature 1..20: note = source = /note="Description of Artificial Sequence: Synthetic oligonucleotide"
  source 1..20: mol_type = other RNA
gtgtcttaaatagaagattt

SEQ ID NO: 8994 - RNA, 20 nt, synthetic construct
  misc_feature 1..20: note = source = /note="Description of Artificial Sequence: Synthetic oligonucleotide"
  source 1..20: mol_type = other RNA
cccgataatatttatttttc

SEQ ID NO: 8995 - RNA, 20 nt, synthetic construct
  misc_feature 1..20: note = source = /note="Description of Artificial Sequence: Synthetic oligonucleotide"
  source 1..20: mol_type = other RNA
ttaagtatttctttcccctt

SEQ ID NO: 8996 - RNA, 20 nt, synthetic construct
  misc_feature 1..20: note = source = /note="Description of Artificial Sequence: Synthetic oligonucleotide"
  source 1..20: mol_type = other RNA
tttaagtatttctttcccct

SEQ ID NO: 8997 - RNA, 20 nt, synthetic construct
  misc_feature 1..20: note = source = /note="Description of Artificial Sequence: Synthetic oligonucleotide"
  source 1..20: mol_type = other RNA
taagtttaagtatttctttc

SEQ ID NO: 8998 - RNA, 20 nt, synthetic construct
  misc_feature 1..20: note = source = /note="Description of Artificial Sequence: Synthetic oligonucleotide"
  source 1..20: mol_type = other RNA
ttaagtttaagtatttcttt

SEQ ID NO: 8999 - RNA, 20 nt, synthetic construct
  misc_feature 1..20: note = source = /note="Description of Artificial Sequence: Synthetic oligonucleotide"
  source 1..20: mol_type = other RNA
tttaagtttaagtatttctt

SEQ ID NO: 9000 - RNA, 20 nt, synthetic construct
  misc_feature 1..20: note = source = /note="Description of Artificial Sequence: Synthetic oligonucleotide"
  source 1..20: mol_type = other RNA
agccggtttaggtcttacac

SEQ ID NO: 9001 - RNA, 20 nt, synthetic construct
  misc_feature 1..20: note = source = /note="Description of Artificial Sequence: Synthetic oligonucleotide"
  source 1..20: mol_type = other RNA
tagccggtttaggtcttaca

SEQ ID NO: 9002 - RNA, 20 nt, synthetic construct
  misc_feature 1..20: note = source = /note="Description of Artificial Sequence: Synthetic oligonucleotide"
  source 1..20: mol_type = other RNA
ttagccggtttaggtcttac

SEQ ID NO: 9003 - RNA, 20 nt, synthetic construct
  misc_feature 1..20: note = source = /note="Description of Artificial Sequence: Synthetic oligonucleotide"
  source 1..20: mol_type = other RNA
gttttcttggttctacttta

SEQ ID NO: 9004 - RNA, 20 nt, synthetic construct
  misc_feature 1..20: note = source = /note="Description of Artificial Sequence: Synthetic oligonucleotide"
  source 1..20: mol_type = other RNA
ctatgacccctatctcctta

SEQ ID NO: 9005 - RNA, 20 nt, synthetic construct
  misc_feature 1..20: note = source = /note="Description of Artificial Sequence: Synthetic oligonucleotide"
  source 1..20: mol_type = other RNA
tgtcttctatgacccctatc

SEQ ID NO: 9006 - RNA, 20 nt, synthetic construct
  misc_feature 1..20: note = source = /note="Description of Artificial Sequence: Synthetic oligonucleotide"
  source 1..20: mol_type = other RNA
ggtcaggtgtcttctatgac

SEQ ID NO: 9007 - RNA, 20 nt, synthetic construct
  misc_feature 1..20: note = source = /note="Description of Artificial Sequence: Synthetic oligonucleotide"
  source 1..20: mol_type = other RNA
tggtcaggtgtcttctatga

SEQ ID NO: 9008 - RNA, 20 nt, synthetic construct
  misc_feature 1..20: note = source = /note="Description of Artificial Sequence: Synthetic oligonucleotide"
  source 1..20: mol_type = other RNA
atggtcaggtgtcttctatg

SEQ ID NO: 9009 - RNA, 20 nt, synthetic construct
  misc_feature 1..20: note = source = /note="Description of Artificial Sequence: Synthetic oligonucleotide"
  source 1..20: mol_type = other RNA
ccaacgtcactcgactctaa

SEQ ID NO: 9010 - RNA, 20 nt, synthetic construct
  misc_feature 1..20: note = source = /note="Description of Artificial Sequence: Synthetic oligonucleotide"
  source 1..20: mol_type = other RNA
tccaacgtcactcgactcta

SEQ ID NO: 9011 - RNA, 20 nt, synthetic construct
  misc_feature 1..20: note = source = /note="Description of Artificial Sequence: Synthetic oligonucleotide"
  source 1..20: mol_type = other RNA
tcgaacttggaccctccacc

SEQ ID NO: 9012 - RNA, 20 nt, synthetic construct
  misc_feature 1..20: note = source = /note="Description of Artificial Sequence: Synthetic oligonucleotide"
  source 1..20: mol_type = other RNA
ttatcgaacttggaccctcc

SEQ ID NO: 9013 - RNA, 20 nt, synthetic construct
  misc_feature 1..20: note = source = /note="Description of Artificial Sequence: Synthetic oligonucleotide"
  source 1..20: mol_type = other RNA
ctcttatcgaacttggaccc

SEQ ID NO: 9014 - RNA, 20 nt, synthetic construct
  misc_feature 1..20: note = source = /note="Description of Artificial Sequence: Synthetic oligonucleotide"
  source 1..20: mol_type = other RNA
gtactcttatcgaacttgga

SEQ ID NO: 9015 - RNA, 20 nt, synthetic construct
  misc_feature 1..20: note = source = /note="Description of Artificial Sequence: Synthetic oligonucleotide"
  source 1..20: mol_type = other RNA
cgtactcttatcgaacttgg

SEQ ID NO: 9016 - RNA, 20 nt, synthetic construct
  misc_feature 1..20: note = source = /note="Description of Artificial Sequence: Synthetic oligonucleotide"
  source 1..20: mol_type = other RNA
gggtcaatgagtcctccgac

SEQ ID NO: 9017 - RNA, 20 nt, synthetic construct
  misc_feature 1..20: note = source = /note="Description of Artificial Sequence: Synthetic oligonucleotide"
  source 1..20: mol_type = other RNA
acgtcagggtcaatgagtcc

SEQ ID NO: 9018 - RNA, 20 nt, synthetic construct
  misc_feature 1..20: note = source = /note="Description of Artificial Sequence: Synthetic oligonucleotide"
  source 1..20: mol_type = other RNA
cgaacgtcagggtcaatgag

SEQ ID NO: 9019 - RNA, 20 nt, synthetic construct
  misc_feature 1..20: note = source = /note="Description of Artificial Sequence: Synthetic oligonucleotide"
  source 1..20: mol_type = other RNA
gtttttagtcgtcctactcc

SEQ ID NO: 9020 - RNA, 20 nt, synthetic construct
  misc_feature 1..20: note = source = /note="Description of Artificial Sequence: Synthetic oligonucleotide"
  source 1..20: mol_type = other RNA
catgtttttagtcgtcctac

SEQ ID NO: 9021 - RNA, 20 nt, synthetic construct
  misc_feature 1..20: note = source = /note="Description of Artificial Sequence: Synthetic oligonucleotide"
  source 1..20: mol_type = other RNA
gattttcatgtttttagtcg

SEQ ID NO: 9022 - RNA, 20 nt, synthetic construct
  misc_feature 1..20: note = source = /note="Description of Artificial Sequence: Synthetic oligonucleotide"
  source 1..20: mol_type = other RNA
ggtctggtcggaccggttgt

SEQ ID NO: 9023 - RNA, 20 nt, synthetic construct
  misc_feature 1..20: note = source = /note="Description of Artificial Sequence: Synthetic oligonucleotide"
  source 1..20: mol_type = other RNA
ggtcctcaaggtctggtcgg

SEQ ID NO: 9024 - RNA, 20 nt, synthetic construct
  misc_feature 1..20: note = source = /note="Description of Artificial Sequence: Synthetic oligonucleotide"
  source 1..20: mol_type = other RNA
acccgcctagtgaactccgg

SEQ ID NO: 9025 - RNA, 20 nt, synthetic construct
  misc_feature 1..20: note = source = /note="Description of Artificial Sequence: Synthetic oligonucleotide"
  source 1..20: mol_type = other RNA
gttccacccgcctagtgaac

SEQ ID NO: 9026 - RNA, 20 nt, synthetic construct
  misc_feature 1..20: note = source = /note="Description of Artificial Sequence: Synthetic oligonucleotide"
  source 1..20: mol_type = other RNA
gaaaccctccggttccaccc

SEQ ID NO: 9027 - RNA, 20 nt, synthetic construct
  misc_feature 1..20: note = source = /note="Description of Artificial Sequence: Synthetic oligonucleotide"
  source 1..20: mol_type = other RNA
cgtgaaaccctccggttcca

SEQ ID NO: 9028 - RNA, 20 nt, synthetic construct
  misc_feature 1..20: note = source = /note="Description of Artificial Sequence: Synthetic oligonucleotide"
  source 1..20: mol_type = other RNA
tcgtgaaaccctccggttcc

SEQ ID NO: 9029 - RNA, 20 nt, synthetic construct
  misc_feature 1..20: note = source = /note="Description of Artificial Sequence: Synthetic oligonucleotide"
  source 1..20: mol_type = other RNA
gggtcgtgaaaccctccggt

SEQ ID NO: 9030 - RNA, 20 nt, synthetic construct
  misc_feature 1..20: note = source = /note="Description of Artificial Sequence: Synthetic oligonucleotide"
  source 1..20: mol_type = other RNA
acattagggtcgtgaaaccc

SEQ ID NO: 9031 - RNA, 20 nt, synthetic construct
  misc_feature 1..20: note = source = /note="Description of Artificial Sequence: Synthetic oligonucleotide"
  source 1..20: mol_type = other RNA
cggacattagggtcgtgaaa

SEQ ID NO: 9032 - RNA, 20 nt, synthetic construct
  misc_feature 1..20: note = source = /note="Description of Artificial Sequence: Synthetic oligonucleotide"
  source 1..20: mol_type = other RNA
acggacattagggtcgtgaa

SEQ ID NO: 9033 - RNA, 20 nt, synthetic construct
  misc_feature 1..20: note = source = /note="Description of Artificial Sequence: Synthetic oligonucleotide"
  source 1..20: mol_type = other RNA
tataatgaatttttagtcga

SEQ ID NO: 9034 - RNA, 20 nt, synthetic construct
  misc_feature 1..20: note = source = /note="Description of Artificial Sequence: Synthetic oligonucleotide"
  source 1..20: mol_type = other RNA
atataatgaatttttagtcg

SEQ ID NO: 9035 - RNA, 20 nt, synthetic construct
  misc_feature 1..20: note = source = /note="Description of Artificial Sequence: Synthetic oligonucleotide"
  source 1..20: mol_type = other RNA
tgagaattatagtgatttta

SEQ ID NO: 9036 - RNA, 20 nt, synthetic construct
  misc_feature 1..20: note = source = /note="Description of Artificial Sequence: Synthetic oligonucleotide"
  source 1..20: mol_type = other RNA
gtgagaattatagtgatttt

SEQ ID NO: 9037 - RNA, 20 nt, synthetic construct
  misc_feature 1..20: note = source = /note="Description of Artificial Sequence: Synthetic oligonucleotide"
  source 1..20: mol_type = other RNA
cttcttgtattactacctag

SEQ ID NO: 9038 - RNA, 20 nt, synthetic construct
  misc_feature 1..20: note = source = /note="Description of Artificial Sequence: Synthetic oligonucleotide"
  source 1..20: mol_type = other RNA
aaactacttcttgtattact

SEQ ID NO: 9039 - RNA, 20 nt, synthetic construct
  misc_feature 1..20: note = source = /note="Description of Artificial Sequence: Synthetic oligonucleotide"
  source 1..20: mol_type = other RNA
agttaactacactttgatag

SEQ ID NO: 9040 - RNA, 20 nt, synthetic construct
  misc_feature 1..20: note = source = /note="Description of Artificial Sequence: Synthetic oligonucleotide"
  source 1..20: mol_type = other RNA
gaattgttttattatctttg

SEQ ID NO: 9041 - RNA, 20 nt, synthetic construct
  misc_feature 1..20: note = source = /note="Description of Artificial Sequence: Synthetic oligonucleotide"
  source 1..20: mol_type = other RNA
atatttttaaagtaaaaatt

SEQ ID NO: 9042 - RNA, 20 nt, synthetic construct
  misc_feature 1..20: note = source = /note="Description of Artificial Sequence: Synthetic oligonucleotide"
  source 1..20: mol_type = other RNA
ttaacctttgatttactatt

SEQ ID NO: 9043 - RNA, 20 nt, synthetic construct
  misc_feature 1..20: note = source = /note="Description of Artificial Sequence: Synthetic oligonucleotide"
  source 1..20: mol_type = other RNA
ctcatggtaaatgatataaa

SEQ ID NO: 9044 - RNA, 20 nt, synthetic construct
  misc_feature 1..20: note = source = /note="Description of Artificial Sequence: Synthetic oligonucleotide"
  source 1..20: mol_type = other RNA
gctcatggtaaatgatataa

SEQ ID NO: 9045 - RNA, 20 nt, synthetic construct
  misc_feature 1..20: note = source = /note="Description of Artificial Sequence: Synthetic oligonucleotide"
  source 1..20: mol_type = other RNA
atgacttgaaatttggctca

SEQ ID NO: 9046 - RNA, 20 nt, synthetic construct
  misc_feature 1..20: note = source = /note="Description of Artificial Sequence: Synthetic oligonucleotide"
  source 1..20: mol_type = other RNA
ttttaatatgacttgaaatt

SEQ ID NO: 9047 - RNA, 20 nt, synthetic construct
  misc_feature 1..20: note = source = /note="Description of Artificial Sequence: Synthetic oligonucleotide"
  source 1..20: mol_type = other RNA
aggtatatttattttgatag

SEQ ID NO: 9048 - RNA, 20 nt, synthetic construct
  misc_feature 1..20: note = source = /note="Description of Artificial Sequence: Synthetic oligonucleotide"
  source 1..20: mol_type = other RNA
aaggtatatttattttgata

SEQ ID NO: 9049 - RNA, 20 nt, synthetic construct
  misc_feature 1..20: note = source = /note="Description of Artificial Sequence: Synthetic oligonucleotide"
  source 1..20: mol_type = other RNA
aaaggtatatttattttgat

SEQ ID NO: 9050 - RNA, 20 nt, synthetic construct
  misc_feature 1..20: note = source = /note="Description of Artificial Sequence: Synthetic oligonucleotide"
  source 1..20: mol_type = other RNA
ctaataaagtggctactaaa

SEQ ID NO: 9051 - RNA, 20 nt, synthetic construct
  misc_feature 1..20: note = source = /note="Description of Artificial Sequence: Synthetic oligonucleotide"
  source 1..20: mol_type = other RNA
aagttgattttctaataaag

SEQ ID NO: 9052 - RNA, 20 nt, synthetic construct
  misc_feature 1..20: note = source = /note="Description of Artificial Sequence: Synthetic oligonucleotide"
  source 1..20: mol_type = other RNA
agttatagaaaaaaacatgg

SEQ ID NO: 9053 - RNA, 20 nt, synthetic construct
  misc_feature 1..20: note = source = /note="Description of Artificial Sequence: Synthetic oligonucleotide"
  source 1..20: mol_type = other RNA
gagttatagaaaaaaacatg

SEQ ID NO: 9054 - RNA, 20 nt, synthetic construct
  misc_feature 1..20: note = source = /note="Description of Artificial Sequence: Synthetic oligonucleotide"
  source 1..20: mol_type = other RNA
agagttatagaaaaaaacat

SEQ ID NO: 9055 - RNA, 20 nt, synthetic construct
  misc_feature 1..20: note = source = /note="Description of Artificial Sequence: Synthetic oligonucleotide"
  source 1..20: mol_type = other RNA
tagagttatagaaaaaaaca

SEQ ID NO: 9056 - RNA, 20 nt, synthetic construct
  misc_feature 1..20: note = source = /note="Description of Artificial Sequence: Synthetic oligonucleotide"
  source 1..20: mol_type = other RNA
gaaattttcccatttaaaat

SEQ ID NO: 9057 - RNA, 20 nt, synthetic construct
  misc_feature 1..20: note = source = /note="Description of Artificial Sequence: Synthetic oligonucleotide"
  source 1..20: mol_type = other RNA
gacttaacatatgaaatttt

SEQ ID NO: 9058 - RNA, 20 nt, synthetic construct
  misc_feature 1..20: note = source = /note="Description of Artificial Sequence: Synthetic oligonucleotide"
  source 1..20: mol_type = other RNA
tgacttaacatatgaaattt

SEQ ID NO: 9059 - RNA, 20 nt, synthetic construct
  misc_feature 1..20: note = source = /note="Description of Artificial Sequence: Synthetic oligonucleotide"
  source 1..20: mol_type = other RNA
ttgcaagactttgatccatc

SEQ ID NO: 9060 - RNA, 20 nt, synthetic construct
  misc_feature 1..20: note = source = /note="Description of Artificial Sequence: Synthetic oligonucleotide"
  source 1..20: mol_type = other RNA
ctacttttgcaagactttga

SEQ ID NO: 9061 - RNA, 20 nt, synthetic construct
  misc_feature 1..20: note = source = /note="Description of Artificial Sequence: Synthetic oligonucleotide"
  source 1..20: mol_type = other RNA
atttatgtcccaaaggaaga

SEQ ID NO: 9062 - RNA, 20 nt, synthetic construct
  misc_feature 1..20: note = source = /note="Description of Artificial Sequence: Synthetic oligonucleotide"
  source 1..20: mol_type = other RNA
tatttatgtcccaaaggaag

SEQ ID NO: 9063 - RNA, 20 nt, synthetic construct
  misc_feature 1..20: note = source = /note="Description of Artificial Sequence: Synthetic oligonucleotide"
  source 1..20: mol_type = other RNA
cactgacggattatttatgt

SEQ ID NO: 9064 - RNA, 20 nt, synthetic construct
  misc_feature 1..20: note = source = /note="Description of Artificial Sequence: Synthetic oligonucleotide"
  source 1..20: mol_type = other RNA
tcactgacggattatttatg

SEQ ID NO: 9065 - RNA, 20 nt, synthetic construct
  misc_feature 1..20: note = source = /note="Description of Artificial Sequence: Synthetic oligonucleotide"
  source 1..20: mol_type = other RNA
ccttccttcttcccctcttc

SEQ ID NO: 9066 - RNA, 20 nt, synthetic construct
  misc_feature 1..20: note = source = /note="Description of Artificial Sequence: Synthetic oligonucleotide"
  source 1..20: mol_type = other RNA
tccttccttcttcccctctt

SEQ ID NO: 9067 - RNA, 20 nt, synthetic construct
  misc_feature 1..20: note = source = /note="Description of Artificial Sequence: Synthetic oligonucleotide"
  source 1..20: mol_type = other RNA
ctccttccttcttcccctct

SEQ ID NO: 9068 - RNA, 20 nt, synthetic construct
  misc_feature 1..20: note = source = /note="Description of Artificial Sequence: Synthetic oligonucleotide"
  source 1..20: mol_type = other RNA
gtgaatctccttccttcttc

SEQ ID NO: 9069 - RNA, 20 nt, synthetic construct
  misc_feature 1..20: note = source = /note="Description of Artificial Sequence: Synthetic oligonucleotide"
  source 1..20: mol_type = other RNA
ggtgaatctccttccttctt

SEQ ID NO: 9070 - RNA, 20 nt, synthetic construct
  misc_feature 1..20: note = source = /note="Description of Artificial Sequence: Synthetic oligonucleotide"
  source 1..20: mol_type = other RNA
cggtgaatctccttccttct

SEQ ID NO: 9071 - RNA, 20 nt, synthetic construct
  misc_feature 1..20: note = source = /note="Description of Artificial Sequence: Synthetic oligonucleotide"
  source 1..20: mol_type = other RNA
acaccaacggtgaatctcct

SEQ ID NO: 9072 - RNA, 20 nt, synthetic construct
  misc_feature 1..20: note = source = /note="Description of Artificial Sequence: Synthetic oligonucleotide"
  source 1..20: mol_type = other RNA
ataaacaccaacggtgaatc

SEQ ID NO: 9073 - RNA, 20 nt, synthetic construct
  misc_feature 1..20: note = source = /note="Description of Artificial Sequence: Synthetic oligonucleotide"
  source 1..20: mol_type = other RNA
tctttgacttacaaataaac

SEQ ID NO: 9074 - RNA, 20 nt, synthetic construct
  misc_feature 1..20: note = source = /note="Description of Artificial Sequence: Synthetic oligonucleotide"
  source 1..20: mol_type = other RNA
attatgttttacgggtctta

SEQ ID NO: 9075 - RNA, 20 nt, synthetic construct
  misc_feature 1..20: note = source = /note="Description of Artificial Sequence: Synthetic oligonucleotide"
  source 1..20: mol_type = other RNA
tactttcttcggtctctctt

SEQ ID NO: 9076 - RNA, 20 nt, synthetic construct
  misc_feature 1..20: note = source = /note="Description of Artificial Sequence: Synthetic oligonucleotide"
  source 1..20: mol_type = other RNA
ttactctgaacttttgtaac

SEQ ID NO: 9077 - RNA, 20 nt, synthetic construct
  misc_feature 1..20: note = source = /note="Description of Artificial Sequence: Synthetic oligonucleotide"
  source 1..20: mol_type = other RNA
ttttttttctttttcttttt

SEQ ID NO: 9078 - RNA, 20 nt, synthetic construct
  misc_feature 1..20: note = source = /note="Description of Artificial Sequence: Synthetic oligonucleotide"
  source 1..20: mol_type = other RNA
tacaccacacttatatatgc

SEQ ID NO: 9079 - RNA, 20 nt, synthetic construct
  misc_feature 1..20: note = source = /note="Description of Artificial Sequence: Synthetic oligonucleotide"
  source 1..20: mol_type = other RNA
tctgagacagagttttttac

SEQ ID NO: 9080 - RNA, 20 nt, synthetic construct
  misc_feature 1..20: note = source = /note="Description of Artificial Sequence: Synthetic oligonucleotide"
  source 1..20: mol_type = other RNA
cgtggtaacgtgggatcgga

SEQ ID NO: 9081 - RNA, 20 nt, synthetic construct
  misc_feature 1..20: note = source = /note="Description of Artificial Sequence: Synthetic oligonucleotide"
  source 1..20: mol_type = other RNA
acgtggtaacgtgggatcgg

SEQ ID NO: 9082 - RNA, 20 nt, synthetic construct
  misc_feature 1..20: note = source = /note="Description of Artificial Sequence: Synthetic oligonucleotide"
  source 1..20: mol_type = other RNA
tgtctccaacgtcactcgac

SEQ ID NO: 9083 - RNA, 20 nt, synthetic construct
  misc_feature 1..20: note = source = /note="Description of Artificial Sequence: Synthetic oligonucleotide"
  source 1..20: mol_type = other RNA
gtgaacttgggccctctgtc

SEQ ID NO: 9084 - RNA, 20 nt, synthetic construct
  misc_feature 1..20: note = source = /note="Description of Artificial Sequence: Synthetic oligonucleotide"
  source 1..20: mol_type = other RNA
gtactcttagtgaacttggg

SEQ ID NO: 9085 - RNA, 20 nt, synthetic construct
  misc_feature 1..20: note = source = /note="Description of Artificial Sequence: Synthetic oligonucleotide"
  source 1..20: mol_type = other RNA
cgtactcttagtgaacttgg

SEQ ID NO: 9086 - RNA, 20 nt, synthetic construct
  misc_feature 1..20: note = source = /note="Description of Artificial Sequence: Synthetic oligonucleotide"
  source 1..20: mol_type = other RNA
agggttgatgaacccccgac

SEQ ID NO: 9087 - RNA, 20 nt, synthetic construct
  misc_feature 1..20: note = source = /note="Description of Artificial Sequence: Synthetic oligonucleotide"
  source 1..20: mol_type = other RNA
gacattagggttgatgaacc

SEQ ID NO: 9088 - RNA, 20 nt, synthetic construct
  misc_feature 1..20: note = source = /note="Description of Artificial Sequence: Synthetic oligonucleotide"
  source 1..20: mol_type = other RNA
tgacattagggttgatgaac

SEQ ID NO: 9089 - RNA, 20 nt, synthetic construct
  misc_feature 1..20: note = source = /note="Description of Artificial Sequence: Synthetic oligonucleotide"
  source 1..20: mol_type = other RNA
ttgacattagggttgatgaa

SEQ ID NO: 9090 - RNA, 20 nt, synthetic construct
  misc_feature 1..20: note = source = /note="Description of Artificial Sequence: Synthetic oligonucleotide"
  source 1..20: mol_type = other RNA
gttgacattagggttgatga

SEQ ID NO: 9091 - RNA, 20 nt, synthetic construct
  misc_feature 1..20: note = source = /note="Description of Artificial Sequence: Synthetic oligonucleotide"
  source 1..20: mol_type = other RNA
gtttttaatcgacccacacc

SEQ ID NO: 9092 - RNA, 20 nt, synthetic construct
  misc_feature 1..20: note = source = /note="Description of Artificial Sequence: Synthetic oligonucleotide"
  source 1..20: mol_type = other RNA
tatgtttttaatcgacccac

SEQ ID NO: 9093 - RNA, 20 nt, synthetic construct
  misc_feature 1..20: note = source = /note="Description of Artificial Sequence: Synthetic oligonucleotide"
  source 1..20: mol_type = other RNA
atttttatgtttttaatcga

SEQ ID NO: 9094 - RNA, 20 nt, synthetic construct
  misc_feature 1..20: note = source = /note="Description of Artificial Sequence: Synthetic oligonucleotide"
  source 1..20: mol_type = other RNA
gatttttatgtttttaatcg

SEQ ID NO: 9095 - RNA, 20 nt, synthetic construct
  misc_feature 1..20: note = source = /note="Description of Artificial Sequence: Synthetic oligonucleotide"
  source 1..20: mol_type = other RNA
actctggtcggatcggttgt

SEQ ID NO: 9096 - RNA, 20 nt, synthetic construct
  misc_feature 1..20: note = source = /note="Description of Artificial Sequence: Synthetic oligonucleotide"
  source 1..20: mol_type = other RNA
attccatcttcctagtgaac

SEQ ID NO: 9097 - RNA, 20 nt, synthetic construct
  misc_feature 1..20: note = source = /note="Description of Artificial Sequence: Synthetic oligonucleotide"
  source 1..20: mol_type = other RNA
gaaatcctccgattccatct

SEQ ID NO: 9098 - RNA, 20 nt, synthetic construct
  misc_feature 1..20: note = source = /note="Description of Artificial Sequence: Synthetic oligonucleotide"
  source 1..20: mol_type = other RNA
gggtcgtgaaatcctccgat

SEQ ID NO: 9099 - RNA, 20 nt, synthetic construct
  misc_feature 1..20: note = source = /note="Description of Artificial Sequence: Synthetic oligonucleotide"
  source 1..20: mol_type = other RNA
acattagggtcgtgaaatcc

SEQ ID NO: 9100 - RNA, 20 nt, synthetic construct
  misc_feature 1..20: note = source = /note="Description of Artificial Sequence: Synthetic oligonucleotide"
  source 1..20: mol_type = other RNA
cgaacattagggtcgtgaaa

SEQ ID NO: 9101 - RNA, 20 nt, synthetic construct
  misc_feature 1..20: note = source = /note="Description of Artificial Sequence: Synthetic oligonucleotide"
  source 1..20: mol_type = other RNA
cttttacaccgacccgtgtc

SEQ ID NO: 9102 - RNA, 20 nt, synthetic construct
  misc_feature 1..20: note = source = /note="Description of Artificial Sequence: Synthetic oligonucleotide"
  source 1..20: mol_type = other RNA
acctttttcttttacaccga

SEQ ID NO: 9103 - RNA, 20 nt, synthetic construct
  misc_feature 1..20: note = source = /note="Description of Artificial Sequence: Synthetic oligonucleotide"
  source 1..20: mol_type = other RNA
tacctttttcttttacaccg

SEQ ID NO: 9104 - RNA, 20 nt, synthetic construct
  misc_feature 1..20: note = source = /note="Description of Artificial Sequence: Synthetic oligonucleotide"
  source 1..20: mol_type = other RNA
tatttacctttttcttttac

SEQ ID NO: 9105 - RNA, 20 nt, synthetic construct
  misc_feature 1..20: note = source = /note="Description of Artificial Sequence: Synthetic oligonucleotide"
  source 1..20: mol_type = other RNA
ttacagttaattgattattt

SEQ ID NO: 9106 - RNA, 20 nt, synthetic construct
  misc_feature 1..20: note = source = /note="Description of Artificial Sequence: Synthetic oligonucleotide"
  source 1..20: mol_type = other RNA
tgaggatccacatatagggt

SEQ ID NO: 9107 - RNA, 20 nt, synthetic construct
  misc_feature 1..20: note = source = /note="Description of Artificial Sequence: Synthetic oligonucleotide"
  source 1..20: mol_type = other RNA
aatgattgttacagtgagga

SEQ ID NO: 9108 - RNA, 20 nt, synthetic construct
  misc_feature 1..20: note = source = /note="Description of Artificial Sequence: Synthetic oligonucleotide"
  source 1..20: mol_type = other RNA
tcgatgaaaccttttgtcaa

SEQ ID NO: 9109 - RNA, 20 nt, synthetic construct
  misc_feature 1..20: note = source = /note="Description of Artificial Sequence: Synthetic oligonucleotide"
  source 1..20: mol_type = other RNA
cattttcgtatttcgatgaa

SEQ ID NO: 9110 - RNA, 20 nt, synthetic construct
  misc_feature 1..20: note = source = /note="Description of Artificial Sequence: Synthetic oligonucleotide"
  source 1..20: mol_type = other RNA
gaccttggaagtatgtaaca

SEQ ID NO: 9111 - RNA, 20 nt, synthetic construct
  misc_feature 1..20: note = source = /note="Description of Artificial Sequence: Synthetic oligonucleotide"
  source 1..20: mol_type = other RNA
aactcctacacctctatgtg

SEQ ID NO: 9112 - RNA, 20 nt, synthetic construct
  misc_feature 1..20: note = source = /note="Description of Artificial Sequence: Synthetic oligonucleotide"
  source 1..20: mol_type = other RNA
tattgtaaaagaactcctac

SEQ ID NO: 9113 - RNA, 20 nt, synthetic construct
  misc_feature 1..20: note = source = /note="Description of Artificial Sequence: Synthetic oligonucleotide"
  source 1..20: mol_type = other RNA
ttctgttattgtaaaagaac

SEQ ID NO: 9114 - RNA, 20 nt, synthetic construct
  misc_feature 1..20: note = source = /note="Description of Artificial Sequence: Synthetic oligonucleotide"
  source 1..20: mol_type = other RNA
tttgaagtatgggtgaacct

SEQ ID NO: 9115 - RNA, 20 nt, synthetic construct
  misc_feature 1..20: note = source = /note="Description of Artificial Sequence: Synthetic oligonucleotide"
  source 1..20: mol_type = other RNA
tctatttgaagtatgggtga

SEQ ID NO: 9116 - RNA, 20 nt, synthetic construct
  misc_feature 1..20: note = source = /note="Description of Artificial Sequence: Synthetic oligonucleotide"
  source 1..20: mol_type = other RNA
ctacgggttatagtcggtaa

SEQ ID NO: 9117 - RNA, 20 nt, synthetic construct
  misc_feature 1..20: note = source = /note="Description of Artificial Sequence: Synthetic oligonucleotide"
  source 1..20: mol_type = other RNA
tgaaaagagtttttttatgt

SEQ ID NO: 9118 - RNA, 20 nt, synthetic construct
  misc_feature 1..20: note = source = /note="Description of Artificial Sequence: Synthetic oligonucleotide"
  source 1..20: mol_type = other RNA
cctcttttatagacgtttgg

SEQ ID NO: 9119 - RNA, 20 nt, synthetic construct
  misc_feature 1..20: note = source = /note="Description of Artificial Sequence: Synthetic oligonucleotide"
  source 1..20: mol_type = other RNA
cttcgctgttggacacccta

SEQ ID NO: 9120 - RNA, 20 nt, synthetic construct
  misc_feature 1..20: note = source = /note="Description of Artificial Sequence: Synthetic oligonucleotide"
  source 1..20: mol_type = other RNA
tttcacttcgctgttggaca

SEQ ID NO: 9121 - RNA, 20 nt, synthetic construct
  misc_feature 1..20: note = source = /note="Description of Artificial Sequence: Synthetic oligonucleotide"
  source 1..20: mol_type = other RNA
gtttcacttcgctgttggac

SEQ ID NO: 9122 - RNA, 20 nt, synthetic construct
  misc_feature 1..20: note = source = /note="Description of Artificial Sequence: Synthetic oligonucleotide"
  source 1..20: mol_type = other RNA
aaattttgaaaacatgaaat

SEQ ID NO: 9123 - RNA, 20 nt, synthetic construct
  misc_feature 1..20: note = source = /note="Description of Artificial Sequence: Synthetic oligonucleotide"
  source 1..20: mol_type = other RNA
ttagaaagtctagaacttac

SEQ ID NO: 9124 - RNA, 20 nt, synthetic construct
  misc_feature 1..20: note = source = /note="Description of Artificial Sequence: Synthetic oligonucleotide"
  source 1..20: mol_type = other RNA
tatgagactcttctttcgta

SEQ ID NO: 9125 - RNA, 20 nt, synthetic construct
  misc_feature 1..20: note = source = /note="Description of Artificial Sequence: Synthetic oligonucleotide"
  source 1..20: mol_type = other RNA
atgaacgtttccttacttca

SEQ ID NO: 9126 - RNA, 20 nt, synthetic construct
  misc_feature 1..20: note = source = /note="Description of Artificial Sequence: Synthetic oligonucleotide"
  source 1..20: mol_type = other RNA
ttgacctgtcgatgaacgtt

SEQ ID NO: 9127 - RNA, 20 nt, synthetic construct
  misc_feature 1..20: note = source = /note="Description of Artificial Sequence: Synthetic oligonucleotide"
  source 1..20: mol_type = other RNA
tgtttaccacgactcttttg

SEQ ID NO: 9128 - RNA, 20 nt, synthetic construct
  misc_feature 1..20: note = source = /note="Description of Artificial Sequence: Synthetic oligonucleotide"
  source 1..20: mol_type = other RNA
tttttgtcagaaaattgttt

SEQ ID NO: 9129 - RNA, 20 nt, synthetic construct
  misc_feature 1..20: note = source = /note="Description of Artificial Sequence: Synthetic oligonucleotide"
  source 1..20: mol_type = other RNA
tctttatttgggtatgtaga

SEQ ID NO: 9130 - RNA, 20 nt, synthetic construct
  misc_feature 1..20: note = source = /note="Description of Artificial Sequence: Synthetic oligonucleotide"
  source 1..20: mol_type = other RNA
cttagtcgtgtcacaccatg

SEQ ID NO: 9131 - RNA, 20 nt, synthetic construct
  misc_feature 1..20: note = source = /note="Description of Artificial Sequence: Synthetic oligonucleotide"
  source 1..20: mol_type = other RNA
gatgtccttagtcgtgtcac

SEQ ID NO: 9132 - RNA, 20 nt, synthetic construct
  misc_feature 1..20: note = source = /note="Description of Artificial Sequence: Synthetic oligonucleotide"
  source 1..20: mol_type = other RNA
ttttaaatgatgttttgatg

SEQ ID NO: 9133 - RNA, 20 nt, synthetic construct
  misc_feature 1..20: note = source = /note="Description of Artificial Sequence: Synthetic oligonucleotide"
  source 1..20: mol_type = other RNA
ccatccgttttcatgtttca

SEQ ID NO: 9134 - RNA, 20 nt, synthetic construct
  misc_feature 1..20: note = source = /note="Description of Artificial Sequence: Synthetic oligonucleotide"
  source 1..20: mol_type = other RNA
cctttgggttctttgtacca

SEQ ID NO: 9135 - RNA, 20 nt, synthetic construct
  misc_feature 1..20: note = source = /note="Description of Artificial Sequence: Synthetic oligonucleotide"
  source 1..20: mol_type = other RNA
tatacctttgggttctttgt

SEQ ID NO: 9136 - RNA, 20 nt, synthetic construct
  misc_feature 1..20: note = source = /note="Description of Artificial Sequence: Synthetic oligonucleotide"
  source 1..20: mol_type = other RNA
tcgactagaattttacgtat

SEQ ID NO: 9137 - RNA, 20 nt, synthetic construct
  misc_feature 1..20: note = source = /note="Description of Artificial Sequence: Synthetic oligonucleotide"
  source 1..20: mol_type = other RNA
tttttttaggtctttccttt

SEQ ID NO: 9138 - RNA, 20 nt, synthetic construct
  misc_feature 1..20: note = source = /note="Description of Artificial Sequence: Synthetic oligonucleotide"
  source 1..20: mol_type = other RNA
tttttttttttttaggtctt

SEQ ID NO: 9139 - RNA, 20 nt, synthetic construct
  misc_feature 1..20: note = source = /note="Description of Artificial Sequence: Synthetic oligonucleotide"
  source 1..20: mol_type = other RNA
gtcctcaagttttggtcgaa

SEQ ID NO: 9140 - RNA, 20 nt, synthetic construct
  misc_feature 1..20: note = source = /note="Description of Artificial Sequence: Synthetic oligonucleotide"
  source 1..20: mol_type = other RNA
ggtcctcaagttttggtcga

SEQ ID NO: 9141 - RNA, 20 nt, synthetic construct
  misc_feature 1..20: note = source = /note="Description of Artificial Sequence: Synthetic oligonucleotide"
  source 1..20: mol_type = other RNA
ctccctcctagagaaatcgg

SEQ ID NO: 9142 - RNA, 20 nt, synthetic construct
  misc_feature 1..20: note = source = /note="Description of Artificial Sequence: Synthetic oligonucleotide"
  source 1..20: mol_type = other RNA
gagacccttcggatcctccc

SEQ ID NO: 9143 - RNA, 20 nt, synthetic construct
  misc_feature 1..20: note = source = /note="Description of Artificial Sequence: Synthetic oligonucleotide"
  source 1..20: mol_type = other RNA
cgagagacccttcggatcct

SEQ ID NO: 9144 - RNA, 20 nt, synthetic construct
  misc_feature 1..20: note = source = /note="Description of Artificial Sequence: Synthetic oligonucleotide"
  source 1..20: mol_type = other RNA
tcgagagacccttcggatcc

SEQ ID NO: 9145 - RNA, 20 nt, synthetic construct
  misc_feature 1..20: note = source = /note="Description of Artificial Sequence: Synthetic oligonucleotide"
  source 1..20: mol_type = other RNA
gggtcgagagacccttcgga

SEQ ID NO: 9146 - RNA, 20 nt, synthetic construct
  misc_feature 1..20: note = source = /note="Description of Artificial Sequence: Synthetic oligonucleotide"
  source 1..20: mol_type = other RNA
cggacattggggtcgagaga

SEQ ID NO: 9147 - RNA, 20 nt, synthetic construct
  misc_feature 1..20: note = source = /note="Description of Artificial Sequence: Synthetic oligonucleotide"
  source 1..20: mol_type = other RNA
acggacattggggtcgagag

SEQ ID NO: 9148 - RNA, 20 nt, synthetic construct
  misc_feature 1..20: note = source = /note="Description of Artificial Sequence: Synthetic oligonucleotide"
  source 1..20: mol_type = other RNA
gtcttcccccaacctacacc

SEQ ID NO: 9149 - RNA, 20 nt, synthetic construct
  misc_feature 1..20: note = source = /note="Description of Artificial Sequence: Synthetic oligonucleotide"
  source 1..20: mol_type = other RNA
agggtcttcccccaacctac

SEQ ID NO: 9150 - RNA, 20 nt, synthetic construct
  misc_feature 1..20: note = source = /note="Description of Artificial Sequence: Synthetic oligonucleotide"
  source 1..20: mol_type = other RNA
agtttcagggtcttccccca

SEQ ID NO: 9151 - RNA, 20 nt, synthetic construct
  misc_feature 1..20: note = source = /note="Description of Artificial Sequence: Synthetic oligonucleotide"
  source 1..20: mol_type = other RNA
ggtcagtttcagggtcttcc

SEQ ID NO: 9152 - RNA, 20 nt, synthetic construct
  misc_feature 1..20: note = source = /note="Description of Artificial Sequence: Synthetic oligonucleotide"
  source 1..20: mol_type = other RNA
gggtcagtttcagggtcttc

SEQ ID NO: 9153 - RNA, 20 nt, synthetic construct
  misc_feature 1..20: note = source = /note="Description of Artificial Sequence: Synthetic oligonucleotide"
  source 1..20: mol_type = other RNA
ggggtcagtttcagggtctt

SEQ ID NO: 9154 - RNA, 20 nt, synthetic construct
  misc_feature 1..20: note = source = /note="Description of Artificial Sequence: Synthetic oligonucleotide"
  source 1..20: mol_type = other RNA
tggggtcagtttcagggtct

SEQ ID NO: 9155 - RNA, 20 nt, synthetic construct
  misc_feature 1..20: note = source = /note="Description of Artificial Sequence: Synthetic oligonucleotide"
  source 1..20: mol_type = other RNA
ttatcggacacaagtattta

SEQ ID NO: 9156 - RNA, 20 nt, synthetic construct
  misc_feature 1..20: note = source = /note="Description of Artificial Sequence: Synthetic oligonucleotide"
  source 1..20: mol_type = other RNA
ctttctttaaattcttattt

SEQ ID NO: 9157 - RNA, 20 nt, synthetic construct
  misc_feature 1..20: note = source = /note="Description of Artificial Sequence: Synthetic oligonucleotide"
  source 1..20: mol_type = other RNA
aattttttttatttttcacg

SEQ ID NO: 9158 - RNA, 20 nt, synthetic construct
  misc_feature 1..20: note = source = /note="Description of Artificial Sequence: Synthetic oligonucleotide"
  source 1..20: mol_type = other RNA
cgtcgtgacgtgagacctga

SEQ ID NO: 9159 - RNA, 20 nt, synthetic construct
  misc_feature 1..20: note = source = /note="Description of Artificial Sequence: Synthetic oligonucleotide"
  source 1..20: mol_type = other RNA
ccgtcgtgacgtgagacctg

SEQ ID NO: 9160 - RNA, 20 nt, synthetic construct
  misc_feature 1..20: note = source = /note="Description of Artificial Sequence: Synthetic oligonucleotide"
  source 1..20: mol_type = other RNA
ctctaccgtcgtgacgtgag

SEQ ID NO: 9161 - RNA, 20 nt, synthetic construct
  misc_feature 1..20: note = source = /note="Description of Artificial Sequence: Synthetic oligonucleotide"
  source 1..20: mol_type = other RNA
ctccaacgtcactcgactct

SEQ ID NO: 9162 - RNA, 20 nt, synthetic construct
  misc_feature 1..20: note = source = /note="Description of Artificial Sequence: Synthetic oligonucleotide"
  source 1..20: mol_type = other RNA
agtgaacttgggcctccacc

SEQ ID NO: 9163 - RNA, 20 nt, synthetic construct
  misc_feature 1..20: note = source = /note="Description of Artificial Sequence: Synthetic oligonucleotide"
  source 1..20: mol_type = other RNA
cttagtgaacttgggcctcc

SEQ ID NO: 9164 - RNA, 20 nt, synthetic construct
  misc_feature 1..20: note = source = /note="Description of Artificial Sequence: Synthetic oligonucleotide"
  source 1..20: mol_type = other RNA
cctcttagtgaacttgggcc

SEQ ID NO: 9165 - RNA, 20 nt, synthetic construct
  misc_feature 1..20: note = source = /note="Description of Artificial Sequence: Synthetic oligonucleotide"
  source 1..20: mol_type = other RNA
cgtcctcttagtgaacttgg

SEQ ID NO: 9166 - RNA, 20 nt, synthetic construct
  misc_feature 1..20: note = source = /note="Description of Artificial Sequence: Synthetic oligonucleotide"
  source 1..20: mol_type = other RNA
ggacatcaaggtcgactccg

SEQ ID NO: 9167 - RNA, 20 nt, synthetic construct
  misc_feature 1..20: note = source = /note="Description of Artificial Sequence: Synthetic oligonucleotide"
  source 1..20: mol_type = other RNA
gcgtggacatcaaggtcgac

SEQ ID NO: 9168 - RNA, 20 nt, synthetic construct
  misc_feature 1..20: note = source = /note="Description of Artificial Sequence: Synthetic oligonucleotide"
  source 1..20: mol_type = other RNA
tttgttaatcggtccgtacc

SEQ ID NO: 9169 - RNA, 20 nt, synthetic construct
  misc_feature 1..20: note = source = /note="Description of Artificial Sequence: Synthetic oligonucleotide"
  source 1..20: mol_type = other RNA
tgttttgttaatcggtccgt

SEQ ID NO: 9170 - RNA, 20 nt, synthetic construct
  misc_feature 1..20: note = source = /note="Description of Artificial Sequence: Synthetic oligonucleotide"
  source 1..20: mol_type = other RNA
ttttgtgttttgttaatcgg

SEQ ID NO: 9171 - RNA, 20 nt, synthetic construct
  misc_feature 1..20: note = source = /note="Description of Artificial Sequence: Synthetic oligonucleotide"
  source 1..20: mol_type = other RNA
actctggtcggaccggttgt

SEQ ID NO: 9172 - RNA, 20 nt, synthetic construct
  misc_feature 1..20: note = source = /note="Description of Artificial Sequence: Synthetic oligonucleotide"
  source 1..20: mol_type = other RNA
ggtccacaaactctggtcgg

SEQ ID NO: 9173 - RNA, 20 nt, synthetic construct
  misc_feature 1..20: note = source = /note="Description of Artificial Sequence: Synthetic oligonucleotide"
  source 1..20: mol_type = other RNA
gtcagtccagtgaactccgg

SEQ ID NO: 9174 - RNA, 20 nt, synthetic construct
  misc_feature 1..20: note = source = /note="Description of Artificial Sequence: Synthetic oligonucleotide"
  source 1..20: mol_type = other RNA
gttccgtcagtccagtgaac

SEQ ID NO: 9175 - RNA, 20 nt, synthetic construct
  misc_feature 1..20: note = source = /note="Description of Artificial Sequence: Synthetic oligonucleotide"
  source 1..20: mol_type = other RNA
aaaccctccggttccgtcag

SEQ ID NO: 9176 - RNA, 20 nt, synthetic construct
  misc_feature 1..20: note = source = /note="Description of Artificial Sequence: Synthetic oligonucleotide"
  source 1..20: mol_type = other RNA
gggtcatgaaaccctccggt

SEQ ID NO: 9177 - RNA, 20 nt, synthetic construct
  misc_feature 1..20: note = source = /note="Description of Artificial Sequence: Synthetic oligonucleotide"
  source 1..20: mol_type = other RNA
acattagggtcatgaaaccc

SEQ ID NO: 9178 - RNA, 20 nt, synthetic construct
  misc_feature 1..20: note = source = /note="Description of Artificial Sequence: Synthetic oligonucleotide"
  source 1..20: mol_type = other RNA
cggacattagggtcatgaaa

SEQ ID NO: 9179 - RNA, 20 nt, synthetic construct
  misc_feature 1..20: note = source = /note="Description of Artificial Sequence: Synthetic oligonucleotide"
  source 1..20: mol_type = other RNA
acggacattagggtcatgaa

SEQ ID NO: 9180 - RNA, 20 nt, synthetic construct
  misc_feature 1..20: note = source = /note="Description of Artificial Sequence: Synthetic oligonucleotide"
  source 1..20: mol_type = other RNA
cttcatgtccggtccgcacc

SEQ ID NO: 9181 - RNA, 20 nt, synthetic construct
  misc_feature 1..20: note = source = /note="Description of Artificial Sequence: Synthetic oligonucleotide"
  source 1..20: mol_type = other RNA
tgtcttcatgtccggtccgc

SEQ ID NO: 9182 - RNA, 20 nt, synthetic construct
  misc_feature 1..20: note = source = /note="Description of Artificial Sequence: Synthetic oligonucleotide"
  source 1..20: mol_type = other RNA
aaaattgtcttcatgtccgg

SEQ ID NO: 9183 - RNA, 20 nt, synthetic construct
  misc_feature 1..20: note = source = /note="Description of Artificial Sequence: Synthetic oligonucleotide"
  source 1..20: mol_type = other RNA
tttttaaaattgtcttcatg

SEQ ID NO: 9184 - RNA, 20 nt, synthetic construct
  misc_feature 1..20: note = source = /note="Description of Artificial Sequence: Synthetic oligonucleotide"
  source 1..20: mol_type = other RNA
ttttttaaactaaaacgtta

SEQ ID NO: 9185 - RNA, 20 nt, synthetic construct
  misc_feature 1..20: note = source = /note="Description of Artificial Sequence: Synthetic oligonucleotide"
  source 1..20: mol_type = other RNA
tcgatcaagtcgttcaacca

SEQ ID NO: 9186 - RNA, 20 nt, synthetic construct
  misc_feature 1..20: note = source = /note="Description of Artificial Sequence: Synthetic oligonucleotide"
  source 1..20: mol_type = other RNA
ttattcgatcaagtcgttca

SEQ ID NO: 9187 - RNA, 20 nt, synthetic construct
  misc_feature 1..20: note = source = /note="Description of Artificial Sequence: Synthetic oligonucleotide"
  source 1..20: mol_type = other RNA
gaacatacgtcgtttaggat

SEQ ID NO: 9188 - RNA, 20 nt, synthetic construct
  misc_feature 1..20: note = source = /note="Description of Artificial Sequence: Synthetic oligonucleotide"
  source 1..20: mol_type = other RNA
tttgtatttcggtgggtcta

SEQ ID NO: 9189 - RNA, 20 nt, synthetic construct
  misc_feature 1..20: note = source = /note="Description of Artificial Sequence: Synthetic oligonucleotide"
  source 1..20: mol_type = other RNA
cttcaagattgacccattag

SEQ ID NO: 9190 - RNA, 20 nt, synthetic construct
  misc_feature 1..20: note = source = /note="Description of Artificial Sequence: Synthetic oligonucleotide"
  source 1..20: mol_type = other RNA
taaaagaccttcaagattga

SEQ ID NO: 9191 - RNA, 20 nt, synthetic construct
  misc_feature 1..20: note = source = /note="Description of Artificial Sequence: Synthetic oligonucleotide"
  source 1..20: mol_type = other RNA
gtaaaagaccttcaagattg

SEQ ID NO: 9192 - RNA, 20 nt, synthetic construct
  misc_feature 1..20: note = source = /note="Description of Artificial Sequence: Synthetic oligonucleotide"
  source 1..20: mol_type = other RNA
attaacatggactgtaaaag

SEQ ID NO: 9193 - RNA, 20 nt, synthetic construct
  misc_feature 1..20: note = source = /note="Description of Artificial Sequence: Synthetic oligonucleotide"
  source 1..20: mol_type = other RNA
aaagattttacttattctgt

SEQ ID NO: 9194 - RNA, 20 nt, synthetic construct
  misc_feature 1..20: note = source = /note="Description of Artificial Sequence: Synthetic oligonucleotide"
  source 1..20: mol_type = other RNA
tgttgatcatagtatgaatt

SEQ ID NO: 9195 - RNA, 20 nt, synthetic construct
  misc_feature 1..20: note = source = /note="Description of Artificial Sequence: Synthetic oligonucleotide"
  source 1..20: mol_type = other RNA
agttgtttgatcgttgtctt

SEQ ID NO: 9196 - RNA, 20 nt, synthetic construct
  misc_feature 1..20: note = source = /note="Description of Artificial Sequence: Synthetic oligonucleotide"
  source 1..20: mol_type = other RNA
aagttgtttgatcgttgtct

SEQ ID NO: 9197 - RNA, 20 nt, synthetic construct
  misc_feature 1..20: note = source = /note="Description of Artificial Sequence: Synthetic oligonucleotide"
  source 1..20: mol_type = other RNA
tatggtataattatcttatt

SEQ ID NO: 9198 - RNA, 20 nt, synthetic construct
  misc_feature 1..20: note = source = /note="Description of Artificial Sequence: Synthetic oligonucleotide"
  source 1..20: mol_type = other RNA
ttatgtgtgactccggttca

SEQ ID NO: 9199 - RNA, 20 nt, synthetic construct
  misc_feature 1..20: note = source = /note="Description of Artificial Sequence: Synthetic oligonucleotide"
  source 1..20: mol_type = other RNA
attatgtgtgactccggttc

SEQ ID NO: 9200 - RNA, 20 nt, synthetic construct
  misc_feature 1..20: note = source = /note="Description of Artificial Sequence: Synthetic oligonucleotide"
  source 1..20: mol_type = other RNA
tatttttcattatgtgtgac

SEQ ID NO: 9201 - RNA, 20 nt, synthetic construct
  misc_feature 1..20: note = source = /note="Description of Artificial Sequence: Synthetic oligonucleotide"
  source 1..20: mol_type = other RNA
gagaaggttttctatctctt

SEQ ID NO: 9202 - RNA, 20 nt, synthetic construct
  misc_feature 1..20: note = source = /note="Description of Artificial Sequence: Synthetic oligonucleotide"
  source 1..20: mol_type = other RNA
tgagaaggttttctatctct

SEQ ID NO: 9203 - RNA, 20 nt, synthetic construct
  misc_feature 1..20: note = source = /note="Description of Artificial Sequence: Synthetic oligonucleotide"
  source 1..20: mol_type = other RNA
agggtgtttcctttcgggtc

SEQ ID NO: 9204 - RNA, 20 nt, synthetic construct
  misc_feature 1..20: note = source = /note="Description of Artificial Sequence: Synthetic oligonucleotide"
  source 1..20: mol_type = other RNA
aagggtgtttcctttcgggt

SEQ ID NO: 9205 - RNA, 20 nt, synthetic construct
  misc_feature 1..20: note = source = /note="Description of Artificial Sequence: Synthetic oligonucleotide"
  source 1..20: mol_type = other RNA
taagggtgtttcctttcggg

SEQ ID NO: 9206 - RNA, 20 nt, synthetic construct
  misc_feature 1..20: note = source = /note="Description of Artificial Sequence: Synthetic oligonucleotide"
  source 1..20: mol_type = other RNA
atgttttttttaagggtgtt

SEQ ID NO: 9207 - RNA, 20 nt, synthetic construct
  misc_feature 1..20: note = source = /note="Description of Artificial Sequence: Synthetic oligonucleotide"
  source 1..20: mol_type = other RNA
tgtccccgtcgtacatgaat

SEQ ID NO: 9208 - RNA, 20 nt, synthetic construct
  misc_feature 1..20: note = source = /note="Description of Artificial Sequence: Synthetic oligonucleotide"
  source 1..20: mol_type = other RNA
ccctccgatacgtgtatgtc

SEQ ID NO: 9209 - RNA, 20 nt, synthetic construct
  misc_feature 1..20: note = source = /note="Description of Artificial Sequence: Synthetic oligonucleotide"
  source 1..20: mol_type = other RNA
tccctccgatacgtgtatgt

SEQ ID NO: 9210 - RNA, 20 nt, synthetic construct
  misc_feature 1..20: note = source = /note="Description of Artificial Sequence: Synthetic oligonucleotide"
  source 1..20: mol_type = other RNA
ctccctccgatacgtgtatg

SEQ ID NO: 9211 - RNA, 20 nt, synthetic construct
  misc_feature 1..20: note = source = /note="Description of Artificial Sequence: Synthetic oligonucleotide"
  source 1..20: mol_type = other RNA
ttcctacaactattactccc

SEQ ID NO: 9212 - RNA, 20 nt, synthetic construct
  misc_feature 1..20: note = source = /note="Description of Artificial Sequence: Synthetic oligonucleotide"
  source 1..20: mol_type = other RNA
catttcctacaactattact

SEQ ID NO: 9213 - RNA, 20 nt, synthetic construct
  misc_feature 1..20: note = source = /note="Description of Artificial Sequence: Synthetic oligonucleotide"
  source 1..20: mol_type = other RNA
ccatttcctacaactattac

SEQ ID NO: 9214 - RNA, 20 nt, synthetic construct
  misc_feature 1..20: note = source = /note="Description of Artificial Sequence: Synthetic oligonucleotide"
  source 1..20: mol_type = other RNA
gtttacatggtaagaccatt

SEQ ID NO: 9215 - RNA, 20 nt, synthetic construct
  misc_feature 1..20: note = source = /note="Description of Artificial Sequence: Synthetic oligonucleotide"
  source 1..20: mol_type = other RNA
gacgttgtttacatggtaag

SEQ ID NO: 9216 - RNA, 20 nt, synthetic construct
  misc_feature 1..20: note = source = /note="Description of Artificial Sequence: Synthetic oligonucleotide"
  source 1..20: mol_type = other RNA
agtagctgttaacagttacg

SEQ ID NO: 9217 - RNA, 20 nt, synthetic construct
  misc_feature 1..20: note = source = /note="Description of Artificial Sequence: Synthetic oligonucleotide"
  source 1..20: mol_type = other RNA
gtgtcttatgtattgtggtt

SEQ ID NO: 9218 - RNA, 20 nt, synthetic construct
  misc_feature 1..20: note = source = /note="Description of Artificial Sequence: Synthetic oligonucleotide"
  source 1..20: mol_type = other RNA
acttactcatagtaatttgt

SEQ ID NO: 9219 - RNA, 20 nt, synthetic construct
  misc_feature 1..20: note = source = /note="Description of Artificial Sequence: Synthetic oligonucleotide"
  source 1..20: mol_type = other RNA
atgagacttactatgacatt

SEQ ID NO: 9220 - RNA, 20 nt, synthetic construct
  misc_feature 1..20: note = source = /note="Description of Artificial Sequence: Synthetic oligonucleotide"
  source 1..20: mol_type = other RNA
atcccatgtctcctgaaaat

SEQ ID NO: 9221 - RNA, 20 nt, synthetic construct
  misc_feature 1..20: note = source = /note="Description of Artificial Sequence: Synthetic oligonucleotide"
  source 1..20: mol_type = other RNA
ctttttatccatcccatgtc

SEQ ID NO: 9222 - RNA, 20 nt, synthetic construct
  misc_feature 1..20: note = source = /note="Description of Artificial Sequence: Synthetic oligonucleotide"
  source 1..20: mol_type = other RNA
catcctctctttttatccat

SEQ ID NO: 9223 - RNA, 20 nt, synthetic construct
  misc_feature 1..20: note = source = /note="Description of Artificial Sequence: Synthetic oligonucleotide"
  source 1..20: mol_type = other RNA
ccatcctctctttttatcca

SEQ ID NO: 9224 - RNA, 20 nt, synthetic construct
  misc_feature 1..20: note = source = /note="Description of Artificial Sequence: Synthetic oligonucleotide"
  source 1..20: mol_type = other RNA
caccccatcctctcttttta

SEQ ID NO: 9225 - RNA, 20 nt, synthetic construct
  misc_feature 1..20: note = source = /note="Description of Artificial Sequence: Synthetic oligonucleotide"
  source 1..20: mol_type = other RNA
aacgattcccaatcacccca

SEQ ID NO: 9226 - RNA, 20 nt, synthetic construct
  misc_feature 1..20: note = source = /note="Description of Artificial Sequence: Synthetic oligonucleotide"
  source 1..20: mol_type = other RNA
aaccaacgattcccaatcac

SEQ ID NO: 9227 - RNA, 20 nt, synthetic construct
  misc_feature 1..20: note = source = /note="Description of Artificial Sequence: Synthetic oligonucleotide"
  source 1..20: mol_type = other RNA
taaccaacgattcccaatca

SEQ ID NO: 9228 - RNA, 20 nt, synthetic construct
  misc_feature 1..20: note = source = /note="Description of Artificial Sequence: Synthetic oligonucleotide"
  source 1..20: mol_type = other RNA
gtaaccaacgattcccaatc

SEQ ID NO: 9229 - RNA, 20 nt, synthetic construct
  misc_feature 1..20: note = source = /note="Description of Artificial Sequence: Synthetic oligonucleotide"
  source 1..20: mol_type = other RNA
ttttctagtaaccaacgatt

SEQ ID NO: 9230 - RNA, 20 nt, synthetic construct
  misc_feature 1..20: note = source = /note="Description of Artificial Sequence: Synthetic oligonucleotide"
  source 1..20: mol_type = other RNA
tttttctagtaaccaacgat

SEQ ID NO: 9231 - RNA, 20 nt, synthetic construct
  misc_feature 1..20: note = source = /note="Description of Artificial Sequence: Synthetic oligonucleotide"
  source 1..20: mol_type = other RNA
ataactctatttttctagta

SEQ ID NO: 9232 - RNA, 20 nt, synthetic construct
  misc_feature 1..20: note = source = /note="Description of Artificial Sequence: Synthetic oligonucleotide"
  source 1..20: mol_type = other RNA
tgatatactgtaagacctta

SEQ ID NO: 9233 - RNA, 20 nt, synthetic construct
  misc_feature 1..20: note = source = /note="Description of Artificial Sequence: Synthetic oligonucleotide"
  source 1..20: mol_type = other RNA
taaggttgatatactgtaag

SEQ ID NO: 9234 - RNA, 20 nt, synthetic construct
  misc_feature 1..20: note = source = /note="Description of Artificial Sequence: Synthetic oligonucleotide"
  source 1..20: mol_type = other RNA
actgtttttggtcagacttt

SEQ ID NO: 9235 - RNA, 20 nt, synthetic construct
  misc_feature 1..20: note = source = /note="Description of Artificial Sequence: Synthetic oligonucleotide"
  source 1..20: mol_type = other RNA
ttacttgctagtactgtacc

SEQ ID NO: 9236 - RNA, 20 nt, synthetic construct
  misc_feature 1..20: note = source = /note="Description of Artificial Sequence: Synthetic oligonucleotide"
  source 1..20: mol_type = other RNA
tctttacttgctagtactgt

SEQ ID NO: 9237 - RNA, 20 nt, synthetic construct
  misc_feature 1..20: note = source = /note="Description of Artificial Sequence: Synthetic oligonucleotide"
  source 1..20: mol_type = other RNA
ttgacactatttggtctgtt

SEQ ID NO: 9238 - RNA, 20 nt, synthetic construct
  misc_feature 1..20: note = source = /note="Description of Artificial Sequence: Synthetic oligonucleotide"
  source 1..20: mol_type = other RNA
ctacagaaagtgatacactt

SEQ ID NO: 9239 - RNA, 20 nt, synthetic construct
  misc_feature 1..20: note = source = /note="Description of Artificial Sequence: Synthetic oligonucleotide"
  source 1..20: mol_type = other RNA
ataagtattaacagttttga

SEQ ID NO: 9240 - RNA, 20 nt, synthetic construct
  misc_feature 1..20: note = source = /note="Description of Artificial Sequence: Synthetic oligonucleotide"
  source 1..20: mol_type = other RNA
cgagacacaataaatgagtt

SEQ ID NO: 9241 - RNA, 20 nt, synthetic construct
  misc_feature 1..20: note = source = /note="Description of Artificial Sequence: Synthetic oligonucleotide"
  source 1..20: mol_type = other RNA
gaaagacaaacaagacgttt

SEQ ID NO: 9242 - RNA, 20 nt, synthetic construct
  misc_feature 1..20: note = source = /note="Description of Artificial Sequence: Synthetic oligonucleotide"
  source 1..20: mol_type = other RNA
tgtcttgtatatctactgga

SEQ ID NO: 9243 - RNA, 20 nt, synthetic construct
  misc_feature 1..20: note = source = /note="Description of Artificial Sequence: Synthetic oligonucleotide"
  source 1..20: mol_type = other RNA
tacgtcttgatattttaaag

SEQ ID NO: 9244 - RNA, 20 nt, synthetic construct
  misc_feature 1..20: note = source = /note="Description of Artificial Sequence: Synthetic oligonucleotide"
  source 1..20: mol_type = other RNA
aacgttttaattacgtttta

SEQ ID NO: 9245 - RNA, 20 nt, synthetic construct
  misc_feature 1..20: note = source = /note="Description of Artificial Sequence: Synthetic oligonucleotide"
  source 1..20: mol_type = other RNA
aaacgttttaattacgtttt

SEQ ID NO: 9246 - RNA, 20 nt, synthetic construct
  misc_feature 1..20: note = source = /note="Description of Artificial Sequence: Synthetic oligonucleotide"
  source 1..20: mol_type = other RNA
tctttaccatgcccttgttg

SEQ ID NO: 9247 - RNA, 20 nt, synthetic construct
  misc_feature 1..20: note = source = /note="Description of Artificial Sequence: Synthetic oligonucleotide"
  source 1..20: mol_type = other RNA
atcagaaattctttaccatg

SEQ ID NO: 9248 - RNA, 20 nt, synthetic construct
  misc_feature 1..20: note = source = /note="Description of Artificial Sequence: Synthetic oligonucleotide"
  source 1..20: mol_type = other RNA
tatcagaaattctttaccat

SEQ ID NO: 9249 - RNA, 20 nt, synthetic construct
  misc_feature 1..20: note = source = /note="Description of Artificial Sequence: Synthetic oligonucleotide"
  source 1..20: mol_type = other RNA
gtttctatcagaaattcttt

SEQ ID NO: 9250 - RNA, 20 nt, synthetic construct
  misc_feature 1..20: note = source = /note="Description of Artificial Sequence: Synthetic oligonucleotide"
  source 1..20: mol_type = other RNA
ctagaaactgtttcatcgtt

SEQ ID NO: 9251 - RNA, 20 nt, synthetic construct
  misc_feature 1..20: note = source = /note="Description of Artificial Sequence: Synthetic oligonucleotide"
  source 1..20: mol_type = other RNA
tcagatctgtttatatagtt

SEQ ID NO: 9252 - RNA, 20 nt, synthetic construct
  misc_feature 1..20: note = source = /note="Description of Artificial Sequence: Synthetic oligonucleotide"
  source 1..20: mol_type = other RNA
aattgttctatcacaccata

SEQ ID NO: 9253 - RNA, 20 nt, synthetic construct
  misc_feature 1..20: note = source = /note="Description of Artificial Sequence: Synthetic oligonucleotide"
  source 1..20: mol_type = other RNA
ggattcaattgttctatcac

SEQ ID NO: 9254 - RNA, 20 nt, synthetic construct
  misc_feature 1..20: note = source = /note="Description of Artificial Sequence: Synthetic oligonucleotide"
  source 1..20: mol_type = other RNA
ttcctctttttgttacagtc

SEQ ID NO: 9255 - RNA, 20 nt, synthetic construct
  misc_feature 1..20: note = source = /note="Description of Artificial Sequence: Synthetic oligonucleotide"
  source 1..20: mol_type = other RNA
ttatcggttgagttatgact

SEQ ID NO: 9256 - RNA, 20 nt, synthetic construct
  misc_feature 1..20: note = source = /note="Description of Artificial Sequence: Synthetic oligonucleotide"
  source 1..20: mol_type = other RNA
acgaaaaaaatgaatcatta

SEQ ID NO: 9257 - RNA, 20 nt, synthetic construct
  misc_feature 1..20: note = source = /note="Description of Artificial Sequence: Synthetic oligonucleotide"
  source 1..20: mol_type = other RNA
taaaatttcaaatatagttc

SEQ ID NO: 9258 - RNA, 20 nt, synthetic construct
  misc_feature 1..20: note = source = /note="Description of Artificial Sequence: Synthetic oligonucleotide"
  source 1..20: mol_type = other RNA
ttttaaggacgttctaaaac

SEQ ID NO: 9259 - RNA, 20 nt, synthetic construct
  misc_feature 1..20: note = source = /note="Description of Artificial Sequence: Synthetic oligonucleotide"
  source 1..20: mol_type = other RNA
cttctacacataacagttct

SEQ ID NO: 9260 - RNA, 20 nt, synthetic construct
  misc_feature 1..20: note = source = /note="Description of Artificial Sequence: Synthetic oligonucleotide"
  source 1..20: mol_type = other RNA
ctacaaggtacaagtaccta

SEQ ID NO: 9261 - RNA, 20 nt, synthetic construct
  misc_feature 1..20: note = source = /note="Description of Artificial Sequence: Synthetic oligonucleotide"
  source 1..20: mol_type = other RNA
tttctctacaaggtacaagt

SEQ ID NO: 9262 - RNA, 20 nt, synthetic construct
  misc_feature 1..20: note = source = /note="Description of Artificial Sequence: Synthetic oligonucleotide"
  source 1..20: mol_type = other RNA
ttttacgttttaagattact

SEQ ID NO: 9263 - RNA, 20 nt, synthetic construct
  misc_feature 1..20: note = source = /note="Description of Artificial Sequence: Synthetic oligonucleotide"
  source 1..20: mol_type = other RNA
tatacatgtaccagatatac

SEQ ID NO: 9264 - RNA, 20 nt, synthetic construct
  misc_feature 1..20: note = source = /note="Description of Artificial Sequence: Synthetic oligonucleotide"
  source 1..20: mol_type = other RNA
ttatacatgtaccagatata

SEQ ID NO: 9265 - RNA, 20 nt, synthetic construct
  misc_feature 1..20: note = source = /note="Description of Artificial Sequence: Synthetic oligonucleotide"
  source 1..20: mol_type = other RNA
attatacatgtaccagatat

SEQ ID NO: 9266 - RNA, 20 nt, synthetic construct
  misc_feature 1..20: note = source = /note="Description of Artificial Sequence: Synthetic oligonucleotide"
  source 1..20: mol_type = other RNA
catatttagattatacatgt

SEQ ID NO: 9267 - RNA, 20 nt, synthetic construct
  misc_feature 1..20: note = source = /note="Description of Artificial Sequence: Synthetic oligonucleotide"
  source 1..20: mol_type = other RNA
actaatatattgtaccaacg

SEQ ID NO: 9268 - RNA, 20 nt, synthetic construct
  misc_feature 1..20: note = source = /note="Description of Artificial Sequence: Synthetic oligonucleotide"
  source 1..20: mol_type = other RNA
agatttcactaatatattgt

SEQ ID NO: 9269 - RNA, 20 nt, synthetic construct
  misc_feature 1..20: note = source = /note="Description of Artificial Sequence: Synthetic oligonucleotide"
  source 1..20: mol_type = other RNA
tactggtttttttttttttg

SEQ ID NO: 9270 - RNA, 20 nt, synthetic construct
  misc_feature 1..20: note = source = /note="Description of Artificial Sequence: Synthetic oligonucleotide"
  source 1..20: mol_type = other RNA
gtaattctgttcttttattt

SEQ ID NO: 9271 - RNA, 20 nt, synthetic construct
  misc_feature 1..20: note = source = /note="Description of Artificial Sequence: Synthetic oligonucleotide"
  source 1..20: mol_type = other RNA
ttacggaaagttgtagtatg

SEQ ID NO: 9272 - RNA, 20 nt, synthetic construct
  misc_feature 1..20: note = source = /note="Description of Artificial Sequence: Synthetic oligonucleotide"
  source 1..20: mol_type = other RNA
aggacgactctagtccttgt

SEQ ID NO: 9273 - RNA, 20 nt, synthetic construct
  misc_feature 1..20: note = source = /note="Description of Artificial Sequence: Synthetic oligonucleotide"
  source 1..20: mol_type = other RNA
cttctaaaggacgactctag

SEQ ID NO: 9274 - RNA, 20 nt, synthetic construct
  misc_feature 1..20: note = source = /note="Description of Artificial Sequence: Synthetic oligonucleotide"
  source 1..20: mol_type = other RNA
agtcatttgatccttttctc

SEQ ID NO: 9275 - RNA, 20 nt, synthetic construct
  misc_feature 1..20: note = source = /note="Description of Artificial Sequence: Synthetic oligonucleotide"
  source 1..20: mol_type = other RNA
gagtcatttgatccttttct

SEQ ID NO: 9276 - RNA, 20 nt, synthetic construct
  misc_feature 1..20: note = source = /note="Description of Artificial Sequence: Synthetic oligonucleotide"
  source 1..20: mol_type = other RNA
agagtcatttgatccttttc

SEQ ID NO: 9277 - RNA, 20 nt, synthetic construct
  misc_feature 1..20: note = source = /note="Description of Artificial Sequence: Synthetic oligonucleotide"
  source 1..20: mol_type = other RNA
gttttcggagagtcatttga

SEQ ID NO: 9278 - RNA, 20 nt, synthetic construct
  misc_feature 1..20: note = source = /note="Description of Artificial Sequence: Synthetic oligonucleotide"
  source 1..20: mol_type = other RNA
gtataccattatagttatcc

SEQ ID NO: 9279 - RNA, 20 nt, synthetic construct
  misc_feature 1..20: note = source = /note="Description of Artificial Sequence: Synthetic oligonucleotide"
  source 1..20: mol_type = other RNA
ttagtataccattatagtta

SEQ ID NO: 9280 - RNA, 20 nt, synthetic construct
  misc_feature 1..20: note = source = /note="Description of Artificial Sequence: Synthetic oligonucleotide"
  source 1..20: mol_type = other RNA
attcgatttctttttagtat

SEQ ID NO: 9281 - RNA, 20 nt, synthetic construct
  misc_feature 1..20: note = source = /note="Description of Artificial Sequence: Synthetic oligonucleotide"
  source 1..20: mol_type = other RNA
ttggtacaccctaaacgagg

SEQ ID NO: 9282 - RNA, 20 nt, synthetic construct
  misc_feature 1..20: note = source = /note="Description of Artificial Sequence: Synthetic oligonucleotide"
  source 1..20: mol_type = other RNA
tattacatagtgttggtaca

SEQ ID NO: 9283 - RNA, 20 nt, synthetic construct
  misc_feature 1..20: note = source = /note="Description of Artificial Sequence: Synthetic oligonucleotide"
  source 1..20: mol_type = other RNA
ttattacatagtgttggtac

SEQ ID NO: 9284 - RNA, 20 nt, synthetic construct
  misc_feature 1..20: note = source = /note="Description of Artificial Sequence: Synthetic oligonucleotide"
  source 1..20: mol_type = other RNA
gaagtattgaataagatact

SEQ ID NO: 9285 - RNA, 20 nt, synthetic construct
  misc_feature 1..20: note = source = /note="Description of Artificial Sequence: Synthetic oligonucleotide"
  source 1..20: mol_type = other RNA
tgaagtattgaataagatac

SEQ ID NO: 9286 - RNA, 20 nt, synthetic construct
  misc_feature 1..20: note = source = /note="Description of Artificial Sequence: Synthetic oligonucleotide"
  source 1..20: mol_type = other RNA
actaaagatggtttcaaaat

SEQ ID NO: 9287 - RNA, 20 nt, synthetic construct
  misc_feature 1..20: note = source = /note="Description of Artificial Sequence: Synthetic oligonucleotide"
  source 1..20: mol_type = other RNA
ttgtttcatggtctgtgtct

SEQ ID NO: 9288 - RNA, 20 nt, synthetic construct
  misc_feature 1..20: note = source = /note="Description of Artificial Sequence: Synthetic oligonucleotide"
  source 1..20: mol_type = other RNA
acgttttattattagattta

SEQ ID NO: 9289 - RNA, 20 nt, synthetic construct
  misc_feature 1..20: note = source = /note="Description of Artificial Sequence: Synthetic oligonucleotide"
  source 1..20: mol_type = other RNA
ctttacctggttaaggaact

SEQ ID NO: 9290 - RNA, 20 nt, synthetic construct
  misc_feature 1..20: note = source = /note="Description of Artificial Sequence: Synthetic oligonucleotide"
  source 1..20: mol_type = other RNA
taaattattagttccacttt

SEQ ID NO: 9291 - RNA, 20 nt, synthetic construct
  misc_feature 1..20: note = source = /note="Description of Artificial Sequence: Synthetic oligonucleotide"
  source 1..20: mol_type = other RNA
cgggtgtgtaaattattagt

SEQ ID NO: 9292 - RNA, 20 nt, synthetic construct
  misc_feature 1..20: note = source = /note="Description of Artificial Sequence: Synthetic oligonucleotide"
  source 1..20: mol_type = other RNA
tctgggacagagtttttgtt

SEQ ID NO: 9293 - RNA, 20 nt, synthetic construct
  misc_feature 1..20: note = source = /note="Description of Artificial Sequence: Synthetic oligonucleotide"
  source 1..20: mol_type = other RNA
tatgatgacgtgaggtcgga

SEQ ID NO: 9294 - RNA, 20 nt, synthetic construct
  misc_feature 1..20: note = source = /note="Description of Artificial Sequence: Synthetic oligonucleotide"
  source 1..20: mol_type = other RNA
gtatgatgacgtgaggtcgg

SEQ ID NO: 9295 - RNA, 20 nt, synthetic construct
  misc_feature 1..20: note = source = /note="Description of Artificial Sequence: Synthetic oligonucleotide"
  source 1..20: mol_type = other RNA
gtgaactcgggtccttcagt

SEQ ID NO: 9296 - RNA, 20 nt, synthetic construct
  misc_feature 1..20: note = source = /note="Description of Artificial Sequence: Synthetic oligonucleotide"
  source 1..20: mol_type = other RNA
acccatttagtgaactcggg

SEQ ID NO: 9297 - RNA, 20 nt, synthetic construct
  misc_feature 1..20: note = source = /note="Description of Artificial Sequence: Synthetic oligonucleotide"
  source 1..20: mol_type = other RNA
cgatgaaccctccgactcca

SEQ ID NO: 9298 - RNA, 20 nt, synthetic construct
  misc_feature 1..20: note = source = /note="Description of Artificial Sequence: Synthetic oligonucleotide"
  source 1..20: mol_type = other RNA
tcgatgaaccctccgactcc

SEQ ID NO: 9299 - RNA, 20 nt, synthetic construct
  misc_feature 1..20: note = source = /note="Description of Artificial Sequence: Synthetic oligonucleotide"
  source 1..20: mol_type = other RNA
ggctcgatgaaccctccgac

SEQ ID NO: 9300 - RNA, 20 nt, synthetic construct
  misc_feature 1..20: note = source = /note="Description of Artificial Sequence: Synthetic oligonucleotide"
  source 1..20: mol_type = other RNA
acatcaggctcgatgaaccc

SEQ ID NO: 9301 - RNA, 20 nt, synthetic construct
  misc_feature 1..20: note = source = /note="Description of Artificial Sequence: Synthetic oligonucleotide"
  source 1..20: mol_type = other RNA
cggacatcaggctcgatgaa

SEQ ID NO: 9302 - RNA, 20 nt, synthetic construct
  misc_feature 1..20: note = source = /note="Description of Artificial Sequence: Synthetic oligonucleotide"
  source 1..20: mol_type = other RNA
acggacatcaggctcgatga

SEQ ID NO: 9303 - RNA, 20 nt, synthetic construct
  misc_feature 1..20: note = source = /note="Description of Artificial Sequence: Synthetic oligonucleotide"
  source 1..20: mol_type = other RNA
ttttttaatcggtccgtacc

SEQ ID NO: 9304 - RNA, 20 nt, synthetic construct
  misc_feature 1..20: note = source = /note="Description of Artificial Sequence: Synthetic oligonucleotide"
  source 1..20: mol_type = other RNA
tatttttttaatcggtccgt

SEQ ID NO: 9305 - RNA, 20 nt, synthetic construct
  misc_feature 1..20: note = source = /note="Description of Artificial Sequence: Synthetic oligonucleotide"
  source 1..20: mol_type = other RNA
attattatttttttaatcgg

SEQ ID NO: 9306 - RNA, 20 nt, synthetic construct
  misc_feature 1..20: note = source = /note="Description of Artificial Sequence: Synthetic oligonucleotide"
  source 1..20: mol_type = other RNA
ttctggtgtgacccgttgta

SEQ ID NO: 9307 - RNA, 20 nt, synthetic construct
  misc_feature 1..20: note = source = /note="Description of Artificial Sequence: Synthetic oligonucleotide"
  source 1..20: mol_type = other RNA
gtcctcaagttctggtgtga

SEQ ID NO: 9308 - RNA, 20 nt, synthetic construct
  misc_feature 1..20: note = source = /note="Description of Artificial Sequence: Synthetic oligonucleotide"
  source 1..20: mol_type = other RNA
ggtcctcaagttctggtgtg

SEQ ID NO: 9309 - RNA, 20 nt, synthetic construct
  misc_feature 1..20: note = source = /note="Description of Artificial Sequence: Synthetic oligonucleotide"
  source 1..20: mol_type = other RNA
gtccgtctaacgaactcagg

SEQ ID NO: 9310 - RNA, 20 nt, synthetic construct
  misc_feature 1..20: note = source = /note="Description of Artificial Sequence: Synthetic oligonucleotide"
  source 1..20: mol_type = other RNA
gtgagaaacctccgactccg

SEQ ID NO: 9311 - RNA, 20 nt, synthetic construct
  misc_feature 1..20: note = source = /note="Description of Artificial Sequence: Synthetic oligonucleotide"
  source 1..20: mol_type = other RNA
ggtagtgagaaacctccgac

SEQ ID NO: 9312 - RNA, 20 nt, synthetic construct
  misc_feature 1..20: note = source = /note="Description of Artificial Sequence: Synthetic oligonucleotide"
  source 1..20: mol_type = other RNA
cgttagggtagtgagaaacc

SEQ ID NO: 9313 - RNA, 20 nt, synthetic construct
  misc_feature 1..20: note = source = /note="Description of Artificial Sequence: Synthetic oligonucleotide"
  source 1..20: mol_type = other RNA
ggacgttagggtagtgagaa

SEQ ID NO: 9314 - RNA, 20 nt, synthetic construct
  misc_feature 1..20: note = source = /note="Description of Artificial Sequence: Synthetic oligonucleotide"
  source 1..20: mol_type = other RNA
acggtagtccgatccacact

SEQ ID NO: 9315 - RNA, 20 nt, synthetic construct
  misc_feature 1..20: note = source = /note="Description of Artificial Sequence: Synthetic oligonucleotide"
  source 1..20: mol_type = other RNA
ttttcaagacggtagtccga

SEQ ID NO: 9316 - RNA, 20 nt, synthetic construct
  misc_feature 1..20: note = source = /note="Description of Artificial Sequence: Synthetic oligonucleotide"
  source 1..20: mol_type = other RNA
aggatttttcaagacggtag

SEQ ID NO: 9317 - RNA, 20 nt, synthetic construct
  misc_feature 1..20: note = source = /note="Description of Artificial Sequence: Synthetic oligonucleotide"
  source 1..20: mol_type = other RNA
agtacgaaggtatcctcctc

SEQ ID NO: 9318 - RNA, 20 nt, synthetic construct
  misc_feature 1..20: note = source = /note="Description of Artificial Sequence: Synthetic oligonucleotide"
  source 1..20: mol_type = other RNA
aagtacgaaggtatcctcct

SEQ ID NO: 9319 - RNA, 20 nt, synthetic construct
  misc_feature 1..20: note = source = /note="Description of Artificial Sequence: Synthetic oligonucleotide"
  source 1..20: mol_type = other RNA
gaagtacgaaggtatcctcc

SEQ ID NO: 9320 - RNA, 20 nt, synthetic construct
  misc_feature 1..20: note = source = /note="Description of Artificial Sequence: Synthetic oligonucleotide"
  source 1..20: mol_type = other RNA
agggaagtacgaaggtatcc

SEQ ID NO: 9321 - RNA, 20 nt, synthetic construct
  misc_feature 1..20: note = source = /note="Description of Artificial Sequence: Synthetic oligonucleotide"
  source 1..20: mol_type = other RNA
tttagggaagtacgaaggta

SEQ ID NO: 9322 - RNA, 20 nt, synthetic construct
  misc_feature 1..20: note = source = /note="Description of Artificial Sequence: Synthetic oligonucleotide"
  source 1..20: mol_type = other RNA
gatgtaagtcctcggtctac

SEQ ID NO: 9323 - RNA, 20 nt, synthetic construct
  misc_feature 1..20: note = source = /note="Description of Artificial Sequence: Synthetic oligonucleotide"
  source 1..20: mol_type = other RNA
aaacactcaaaagatgtaag

SEQ ID NO: 9324 - RNA, 20 nt, synthetic construct
  misc_feature 1..20: note = source = /note="Description of Artificial Sequence: Synthetic oligonucleotide"
  source 1..20: mol_type = other RNA
gtttccgtaggtcagtatta

SEQ ID NO: 9325 - RNA, 20 nt, synthetic construct
  misc_feature 1..20: note = source = /note="Description of Artificial Sequence: Synthetic oligonucleotide"
  source 1..20: mol_type = other RNA
aagtcacacttgttgaggtt

SEQ ID NO: 9326 - RNA, 20 nt, synthetic construct
  misc_feature 1..20: note = source = /note="Description of Artificial Sequence: Synthetic oligonucleotide"
  source 1..20: mol_type = other RNA
atattaactacttaacgacc

SEQ ID NO: 9327 - RNA, 20 nt, synthetic construct
  misc_feature 1..20: note = source = /note="Description of Artificial Sequence: Synthetic oligonucleotide"
  source 1..20: mol_type = other RNA
tttatattaactacttaacg

SEQ ID NO: 9328 - RNA, 20 nt, synthetic construct
  misc_feature 1..20: note = source = /note="Description of Artificial Sequence: Synthetic oligonucleotide"
  source 1..20: mol_type = other RNA
catccttggtcacaacccta

SEQ ID NO: 9329 - RNA, 20 nt, synthetic construct
  misc_feature 1..20: note = source = /note="Description of Artificial Sequence: Synthetic oligonucleotide"
  source 1..20: mol_type = other RNA
ggagacatccttggtcacaa

SEQ ID NO: 9330 - RNA, 20 nt, synthetic construct
  misc_feature 1..20: note = source = /note="Description of Artificial Sequence: Synthetic oligonucleotide"
  source 1..20: mol_type = other RNA
tggagacatccttggtcaca

SEQ ID NO: 9331 - RNA, 20 nt, synthetic construct
  misc_feature 1..20: note = source = /note="Description of Artificial Sequence: Synthetic oligonucleotide"
  source 1..20: mol_type = other RNA
tgacctcgtctttggagaca

SEQ ID NO: 9332 - RNA, 20 nt, synthetic construct
  misc_feature 1..20: note = source = /note="Description of Artificial Sequence: Synthetic oligonucleotide"
  source 1..20: mol_type = other RNA
atttttcttaatgtcgaatg

SEQ ID NO: 9333 - RNA, 20 nt, synthetic construct
  misc_feature 1..20: note = source = /note="Description of Artificial Sequence: Synthetic oligonucleotide"
  source 1..20: mol_type = other RNA
gagtgttggttccttcgtct

SEQ ID NO: 9334 - RNA, 20 nt, synthetic construct
  misc_feature 1..20: note = source = /note="Description of Artificial Sequence: Synthetic oligonucleotide"
  source 1..20: mol_type = other RNA
ttagtgacgggagtgttggt

SEQ ID NO: 9335 - RNA, 20 nt, synthetic construct
  misc_feature 1..20: note = source = /note="Description of Artificial Sequence: Synthetic oligonucleotide"
  source 1..20: mol_type = other RNA
cagtctctttactccagtgt

SEQ ID NO: 9336 - RNA, 20 nt, synthetic construct
  misc_feature 1..20: note = source = /note="Description of Artificial Sequence: Synthetic oligonucleotide"
  source 1..20: mol_type = other RNA
acagtctctttactccagtg

SEQ ID NO: 9337 - RNA, 20 nt, synthetic construct
  misc_feature 1..20: note = source = /note="Description of Artificial Sequence: Synthetic oligonucleotide"
  source 1..20: mol_type = other RNA
aatctagacagtctctttac

SEQ ID NO: 9338 - RNA, 20 nt, synthetic construct
  misc_feature 1..20: note = source = /note="Description of Artificial Sequence: Synthetic oligonucleotide"
  source 1..20: mol_type = other RNA
ttagacttatatggatgttg

SEQ ID NO: 9339 - RNA, 20 nt, synthetic construct
  misc_feature 1..20: note = source = /note="Description of Artificial Sequence: Synthetic oligonucleotide"
  source 1..20: mol_type = other RNA
gtatgagtataaaataacct

SEQ ID NO: 9340 - RNA, 20 nt, synthetic construct
  misc_feature 1..20: note = source = /note="Description of Artificial Sequence: Synthetic oligonucleotide"
  source 1..20: mol_type = other RNA
agctgtatgagtataaaata

SEQ ID NO: 9341 - RNA, 20 nt, synthetic construct
  misc_feature 1..20: note = source = /note="Description of Artificial Sequence: Synthetic oligonucleotide"
  source 1..20: mol_type = other RNA
tttatatgaggatatgtcag

SEQ ID NO: 9342 - RNA, 20 nt, synthetic construct
  misc_feature 1..20: note = source = /note="Description of Artificial Sequence: Synthetic oligonucleotide"
  source 1..20: mol_type = other RNA
ttgttcgtttaaacccatta

SEQ ID NO: 9343 - RNA, 20 nt, synthetic construct
  misc_feature 1..20: note = source = /note="Description of Artificial Sequence: Synthetic oligonucleotide"
  source 1..20: mol_type = other RNA
gtacttattgttcgtttaaa

SEQ ID NO: 9344 - RNA, 20 nt, synthetic construct
  misc_feature 1..20: note = source = /note="Description of Artificial Sequence: Synthetic oligonucleotide"
  source 1..20: mol_type = other RNA
tgtacttattgttcgtttaa

SEQ ID NO: 9345 - RNA, 20 nt, synthetic construct
  misc_feature 1..20: note = source = /note="Description of Artificial Sequence: Synthetic oligonucleotide"
  source 1..20: mol_type = other RNA
tgcactttgtaagaggtcct

SEQ ID NO: 9346 - RNA, 20 nt, synthetic construct
  misc_feature 1..20: note = source = /note="Description of Artificial Sequence: Synthetic oligonucleotide"
  source 1..20: mol_type = other RNA
cgtgtgcactttgtaagagg

SEQ ID NO: 9347 - RNA, 20 nt, synthetic construct
  misc_feature 1..20: note = source = /note="Description of Artificial Sequence: Synthetic oligonucleotide"
  source 1..20: mol_type = other RNA
tttttgtgatatttggttga

SEQ ID NO: 9348 - RNA, 20 nt, synthetic construct
  misc_feature 1..20: note = source = /note="Description of Artificial Sequence: Synthetic oligonucleotide"
  source 1..20: mol_type = other RNA
atgattaggtgaaagttatt

SEQ ID NO: 9349 - RNA, 20 nt, synthetic construct
  misc_feature 1..20: note = source = /note="Description of Artificial Sequence: Synthetic oligonucleotide"
  source 1..20: mol_type = other RNA
cgttttttaccgtcttaatt

SEQ ID NO: 9350 - RNA, 20 nt, synthetic construct
  misc_feature 1..20: note = source = /note="Description of Artificial Sequence: Synthetic oligonucleotide"
  source 1..20: mol_type = other RNA
ttttatgtacttcgtttttt

SEQ ID NO: 9351 - RNA, 20 nt, synthetic construct
  misc_feature 1..20: note = source = /note="Description of Artificial Sequence: Synthetic oligonucleotide"
  source 1..20: mol_type = other RNA
tatatttaactttttaattt

SEQ ID NO: 9352 - RNA, 20 nt, synthetic construct
  misc_feature 1..20: note = source = /note="Description of Artificial Sequence: Synthetic oligonucleotide"
  source 1..20: mol_type = other RNA
ttctgttctatgtctgtttt

SEQ ID NO: 9353 - RNA, 20 nt, synthetic construct
  misc_feature 1..20: note = source = /note="Description of Artificial Sequence: Synthetic oligonucleotide"
  source 1..20: mol_type = other RNA
tttttaaatcattttctgtt

SEQ ID NO: 9354 - RNA, 20 nt, synthetic construct
  misc_feature 1..20: note = source = /note="Description of Artificial Sequence: Synthetic oligonucleotide"
  source 1..20: mol_type = other RNA
ttttttaaatcattttctgt

SEQ ID NO: 9355 - RNA, 20 nt, synthetic construct
  misc_feature 1..20: note = source = /note="Description of Artificial Sequence: Synthetic oligonucleotide"
  source 1..20: mol_type = other RNA
attcaatcaacattaggggt

SEQ ID NO: 9356 - RNA, 20 nt, synthetic construct
  misc_feature 1..20: note = source = /note="Description of Artificial Sequence: Synthetic oligonucleotide"
  source 1..20: mol_type = other RNA
tattcaatcaacattagggg

SEQ ID NO: 9357 - RNA, 20 nt, synthetic construct
  misc_feature 1..20: note = source = /note="Description of Artificial Sequence: Synthetic oligonucleotide"
  source 1..20: mol_type = other RNA
aggaatataacattacttta

SEQ ID NO: 9358 - RNA, 20 nt, synthetic construct
  misc_feature 1..20: note = source = /note="Description of Artificial Sequence: Synthetic oligonucleotide"
  source 1..20: mol_type = other RNA
ttctcccttacatcgatata

SEQ ID NO: 9359 - RNA, 20 nt, synthetic construct
  misc_feature 1..20: note = source = /note="Description of Artificial Sequence: Synthetic oligonucleotide"
  source 1..20: mol_type = other RNA
tttctcccttacatcgatat

SEQ ID NO: 9360 - RNA, 20 nt, synthetic construct
  misc_feature 1..20: note = source = /note="Description of Artificial Sequence: Synthetic oligonucleotide"
  source 1..20: mol_type = other RNA
ttatcgtgtctcatttttct

SEQ ID NO: 9361 - RNA, 20 nt, synthetic construct
  misc_feature 1..20: note = source = /note="Description of Artificial Sequence: Synthetic oligonucleotide"
  source 1..20: mol_type = other RNA
attatcgtgtctcatttttc

SEQ ID NO: 9362 - RNA, 20 nt, synthetic construct
  misc_feature 1..20: note = source = /note="Description of Artificial Sequence: Synthetic oligonucleotide"
  source 1..20: mol_type = other RNA
ttttgtattagacacaatta

SEQ ID NO: 9363 - RNA, 20 nt, synthetic construct
  misc_feature 1..20: note = source = /note="Description of Artificial Sequence: Synthetic oligonucleotide"
  source 1..20: mol_type = other RNA
tttttgtattagacacaatt

SEQ ID NO: 9364 - RNA, 20 nt, synthetic construct
  misc_feature 1..20: note = source = /note="Description of Artificial Sequence: Synthetic oligonucleotide"
  source 1..20: mol_type = other RNA
tggtcatttctattaatgta

SEQ ID NO: 9365 - RNA, 20 nt, synthetic construct
  misc_feature 1..20: note = source = /note="Description of Artificial Sequence: Synthetic oligonucleotide"
  source 1..20: mol_type = other RNA
tatgaagtccgactttcctt

SEQ ID NO: 9366 - RNA, 20 nt, synthetic construct
  misc_feature 1..20: note = source = /note="Description of Artificial Sequence: Synthetic oligonucleotide"
  source 1..20: mol_type = other RNA
ttacatatgaagtccgactt

SEQ ID NO: 9367 - RNA, 20 nt, synthetic construct
  misc_feature 1..20: note = source = /note="Description of Artificial Sequence: Synthetic oligonucleotide"
  source 1..20: mol_type = other RNA
tttatgatttacatatgaag

SEQ ID NO: 9368 - RNA, 20 nt, synthetic construct
  misc_feature 1..20: note = source = /note="Description of Artificial Sequence: Synthetic oligonucleotide"
  source 1..20: mol_type = other RNA
ttattctcaaataacaaaag

SEQ ID NO: 9369 - RNA, 20 nt, synthetic construct
  misc_feature 1..20: note = source = /note="Description of Artificial Sequence: Synthetic oligonucleotide"
  source 1..20: mol_type = other RNA
ttacataatatattatttaa

SEQ ID NO: 9370 - RNA, 20 nt, synthetic construct
  misc_feature 1..20: note = source = /note="Description of Artificial Sequence: Synthetic oligonucleotide"
  source 1..20: mol_type = other RNA
gtctttgttacttctggtct

SEQ ID NO: 9371 - RNA, 20 nt, synthetic construct
  misc_feature 1..20: note = source = /note="Description of Artificial Sequence: Synthetic oligonucleotide"
  source 1..20: mol_type = other RNA
acatactaatagtacatacg

SEQ ID NO: 9372 - RNA, 20 nt, synthetic construct
  misc_feature 1..20: note = source = /note="Description of Artificial Sequence: Synthetic oligonucleotide"
  source 1..20: mol_type = other RNA
cttcttataaactttttatt

SEQ ID NO: 9373 - RNA, 20 nt, synthetic construct
  misc_feature 1..20: note = source = /note="Description of Artificial Sequence: Synthetic oligonucleotide"
  source 1..20: mol_type = other RNA
ctcctacttcttatttctta

SEQ ID NO: 9374 - RNA, 20 nt, synthetic construct
  misc_feature 1..20: note = source = /note="Description of Artificial Sequence: Synthetic oligonucleotide"
  source 1..20: mol_type = other RNA
ttacgtccaggggtttcatc

SEQ ID NO: 9375 - RNA, 20 nt, synthetic construct
  misc_feature 1..20: note = source = /note="Description of Artificial Sequence: Synthetic oligonucleotide"
  source 1..20: mol_type = other RNA
atggttgtatctgtattacg

SEQ ID NO: 9376 - RNA, 20 nt, synthetic construct
  misc_feature 1..20: note = source = /note="Description of Artificial Sequence: Synthetic oligonucleotide"
  source 1..20: mol_type = other RNA
ttgtcttggagtctctagac

SEQ ID NO: 9377 - RNA, 20 nt, synthetic construct
  misc_feature 1..20: note = source = /note="Description of Artificial Sequence: Synthetic oligonucleotide"
  source 1..20: mol_type = other RNA
caacttttcctccccttttt

SEQ ID NO: 9378 - RNA, 20 nt, synthetic construct
  misc_feature 1..20: note = source = /note="Description of Artificial Sequence: Synthetic oligonucleotide"
  source 1..20: mol_type = other RNA
tcaacttttcctcccctttt

SEQ ID NO: 9379 - RNA, 20 nt, synthetic construct
  misc_feature 1..20: note = source = /note="Description of Artificial Sequence: Synthetic oligonucleotide"
  source 1..20: mol_type = other RNA
tatcgtctcaacttttcctc

SEQ ID NO: 9380 - RNA, 20 nt, synthetic construct
  misc_feature 1..20: note = source = /note="Description of Artificial Sequence: Synthetic oligonucleotide"
  source 1..20: mol_type = other RNA
ttatcgtctcaacttttcct

SEQ ID NO: 9381 - RNA, 20 nt, synthetic construct
  misc_feature 1..20: note = source = /note="Description of Artificial Sequence: Synthetic oligonucleotide"
  source 1..20: mol_type = other RNA
gttatcgtctcaacttttcc

SEQ ID NO: 9382 - RNA, 20 nt, synthetic construct
  misc_feature 1..20: note = source = /note="Description of Artificial Sequence: Synthetic oligonucleotide"
  source 1..20: mol_type = other RNA
caagttatcgtctcaacttt

SEQ ID NO: 9383 - RNA, 20 nt, synthetic construct
  misc_feature 1..20: note = source = /note="Description of Artificial Sequence: Synthetic oligonucleotide"
  source 1..20: mol_type = other RNA
ttgacgtcatttttaatctc

SEQ ID NO: 9384 - RNA, 20 nt, synthetic construct
  misc_feature 1..20: note = source = /note="Description of Artificial Sequence: Synthetic oligonucleotide"
  source 1..20: mol_type = other RNA
attgacgtcatttttaatct

SEQ ID NO: 9385 - RNA, 20 nt, synthetic construct
  misc_feature 1..20: note = source = /note="Description of Artificial Sequence: Synthetic oligonucleotide"
  source 1..20: mol_type = other RNA
tattgacgtcatttttaatc

SEQ ID NO: 9386 - RNA, 20 nt, synthetic construct
  misc_feature 1..20: note = source = /note="Description of Artificial Sequence: Synthetic oligonucleotide"
  source 1..20: mol_type = other RNA
ttcaggtctacaatccggtg

SEQ ID NO: 9387 - RNA, 20 nt, synthetic construct
  misc_feature 1..20: note = source = /note="Description of Artificial Sequence: Synthetic oligonucleotide"
  source 1..20: mol_type = other RNA
ggactttttcaggtctacaa

SEQ ID NO: 9388 - RNA, 20 nt, synthetic construct
  misc_feature 1..20: note = source = /note="Description of Artificial Sequence: Synthetic oligonucleotide"
  source 1..20: mol_type = other RNA
gggatatttcatcagttatc

SEQ ID NO: 9389 - RNA, 20 nt, synthetic construct
  misc_feature 1..20: note = source = /note="Description of Artificial Sequence: Synthetic oligonucleotide"
  source 1..20: mol_type = other RNA
tctctttgtctttgtttcat

SEQ ID NO: 9390 - RNA, 20 nt, synthetic construct
  misc_feature 1..20: note = source = /note="Description of Artificial Sequence: Synthetic oligonucleotide"
  source 1..20: mol_type = other RNA
agagttgcacgaccctaatg

SEQ ID NO: 9391 - RNA, 20 nt, synthetic construct
  misc_feature 1..20: note = source = /note="Description of Artificial Sequence: Synthetic oligonucleotide"
  source 1..20: mol_type = other RNA
gaaaccggagagttgcacga

SEQ ID NO: 9392 - RNA, 20 nt, synthetic construct
  misc_feature 1..20: note = source = /note="Description of Artificial Sequence: Synthetic oligonucleotide"
  source 1..20: mol_type = other RNA
cgaaaccggagagttgcacg

SEQ ID NO: 9393 - RNA, 20 nt, synthetic construct
  misc_feature 1..20: note = source = /note="Description of Artificial Sequence: Synthetic oligonucleotide"
  source 1..20: mol_type = other RNA
gaattcactacgaggacgaa

SEQ ID NO: 9394 - RNA, 20 nt, synthetic construct
  misc_feature 1..20: note = source = /note="Description of Artificial Sequence: Synthetic oligonucleotide"
  source 1..20: mol_type = other RNA
gtccgatcagaacttgagga

SEQ ID NO: 9395 - RNA, 20 nt, synthetic construct
  misc_feature 1..20: note = source = /note="Description of Artificial Sequence: Synthetic oligonucleotide"
  source 1..20: mol_type = other RNA
ggtccgatcagaacttgagg

SEQ ID NO: 9396 - RNA, 20 nt, synthetic construct
  misc_feature 1..20: note = source = /note="Description of Artificial Sequence: Synthetic oligonucleotide"
  source 1..20: mol_type = other RNA
tcccagagtgatacgacggg

SEQ ID NO: 9397 - RNA, 20 nt, synthetic construct
  misc_feature 1..20: note = source = /note="Description of Artificial Sequence: Synthetic oligonucleotide"
  source 1..20: mol_type = other RNA
aaaaataaaaacatctctgt

SEQ ID NO: 9398 - RNA, 20 nt, synthetic construct
  misc_feature 1..20: note = source = /note="Description of Artificial Sequence: Synthetic oligonucleotide"
  source 1..20: mol_type = other RNA
taaaaataaaaacatctctg

SEQ ID NO: 9399 - RNA, 20 nt, synthetic construct
  misc_feature 1..20: note = source = /note="Description of Artificial Sequence: Synthetic oligonucleotide"
  source 1..20: mol_type = other RNA
tcattgtataagacccgtcc

SEQ ID NO: 9400 - RNA, 20 nt, synthetic construct
  misc_feature 1..20: note = source = /note="Description of Artificial Sequence: Synthetic oligonucleotide"
  source 1..20: mol_type = other RNA
gtcattgtataagacccgtc

SEQ ID NO: 9401 - RNA, 20 nt, synthetic construct
  misc_feature 1..20: note = source = /note="Description of Artificial Sequence: Synthetic oligonucleotide"
  source 1..20: mol_type = other RNA
tgtcattgtataagacccgt

SEQ ID NO: 9402 - RNA, 20 nt, synthetic construct
  misc_feature 1..20: note = source = /note="Description of Artificial Sequence: Synthetic oligonucleotide"
  source 1..20: mol_type = other RNA
ttgtcattgtataagacccg

SEQ ID NO: 9403 - RNA, 20 nt, synthetic construct
  source 1..20: mol_type = other RNA
gtctttgtcattgtataaga

SEQ ID NO: 9404 - RNA, 20 nt, synthetic construct
  misc_feature 1..20: note = source = /note="Description of Artificial Sequence: Synthetic oligonucleotide"
  source 1..20: mol_type = other RNA
ggtctttgtcattgtataag

SEQ ID NO: 9405 - RNA, 20 nt, synthetic construct
  misc_feature 1..20: note = source = /note="Description of Artificial Sequence: Synthetic oligonucleotide"
  source 1..20: mol_type = other RNA
tctttgttatgtttgaaata

SEQ ID NO: 9406 - RNA, 20 nt, synthetic construct
  misc_feature 1..20: note = source = /note="Description of Artificial Sequence: Synthetic oligonucleotide"
  source 1..20: mol_type = other RNA
attggttcgtttctgaagct

SEQ ID NO: 9407 - RNA, 20 nt, synthetic construct
  misc_feature 1..20: note = source = /note="Description of Artificial Sequence: Synthetic oligonucleotide"
  source 1..20: mol_type = other RNA
aataactagagtccgtggat

SEQ ID NO: 9408 - RNA, 20 nt, synthetic construct
  misc_feature 1..20: note = source = /note="Description of Artificial Sequence: Synthetic oligonucleotide"
  source 1..20: mol_type = other RNA
ttctgactgaataactagag

SEQ ID NO: 9409 - RNA, 20 nt, synthetic construct
  misc_feature 1..20: note = source = /note="Description of Artificial Sequence: Synthetic oligonucleotide"
  source 1..20: mol_type = other RNA
taggtctcgacgtttatcgg

SEQ ID NO: 9410 - RNA, 20 nt, synthetic construct
  misc_feature 1..20: note = source = /note="Description of Artificial Sequence: Synthetic oligonucleotide"
  source 1..20: mol_type = other RNA
agacgtgttcgtcccttatt

SEQ ID NO: 9411 - RNA, 20 nt, synthetic construct
  misc_feature 1..20: note = source = /note="Description of Artificial Sequence: Synthetic oligonucleotide"
  source 1..20: mol_type = other RNA
gaactctgagacgtgttcgt

SEQ ID NO: 9412 - RNA, 20 nt, synthetic construct
  misc_feature 1..20: note = source = /note="Description of Artificial Sequence: Synthetic oligonucleotide"
  source 1..20: mol_type = other RNA
ggaactctgagacgtgttcg

SEQ ID NO: 9413 - RNA, 20 nt, synthetic construct
  misc_feature 1..20: note = source = /note="Description of Artificial Sequence: Synthetic oligonucleotide"
  source 1..20: mol_type = other RNA
ctttcggtgtacgttgacat

SEQ ID NO: 9414 - RNA, 20 nt, synthetic construct
  misc_feature 1..20: note = source = /note="Description of Artificial Sequence: Synthetic oligonucleotide"
  source 1..20: mol_type = other RNA
tctttcggtgtacgttgaca

SEQ ID NO: 9415 - RNA, 20 nt, synthetic construct
  misc_feature 1..20: note = source = /note="Description of Artificial Sequence: Synthetic oligonucleotide"
  source 1..20: mol_type = other RNA
ccgaaacttttatataagga

SEQ ID NO: 9416 - RNA, 20 nt, synthetic construct
  misc_feature 1..20: note = source = /note="Description of Artificial Sequence: Synthetic oligonucleotide"
  source 1..20: mol_type = other RNA
tccgaaacttttatataagg

SEQ ID NO: 9417 - RNA, 20 nt, synthetic construct
  misc_feature 1..20: note = source = /note="Description of Artificial Sequence: Synthetic oligonucleotide"
  source 1..20: mol_type = other RNA
ctttactctactaggtgtcc

SEQ ID NO: 9418 - RNA, 20 nt, synthetic construct
  misc_feature 1..20: note = source = /note="Description of Artificial Sequence: Synthetic oligonucleotide"
  source 1..20: mol_type = other RNA
accctttactctactaggtg

SEQ ID NO: 9419 - RNA, 20 nt, synthetic construct
  misc_feature 1..20: note = source = /note="Description of Artificial Sequence: Synthetic oligonucleotide"
  source 1..20: mol_type = other RNA
tcgaattttcatttaatgga

SEQ ID NO: 9420 - RNA, 20 nt, synthetic construct
  misc_feature 1..20: note = source = /note="Description of Artificial Sequence: Synthetic oligonucleotide"
  source 1..20: mol_type = other RNA
ttcgaattttcatttaatgg

SEQ ID NO: 9421 - RNA, 20 nt, synthetic construct
  misc_feature 1..20: note = source = /note="Description of Artificial Sequence: Synthetic oligonucleotide"
  source 1..20: mol_type = other RNA
tgagtccacatcgattattg

SEQ ID NO: 9422 - RNA, 20 nt, synthetic construct
  misc_feature 1..20: note = source = /note="Description of Artificial Sequence: Synthetic oligonucleotide"
  source 1..20: mol_type = other RNA
aacttataacagtgactgag

SEQ ID NO: 9423 - RNA, 20 nt, synthetic construct
  misc_feature 1..20: note = source = /note="Description of Artificial Sequence: Synthetic oligonucleotide"
  source 1..20: mol_type = other RNA
ccgtaaacagtttattagta

SEQ ID NO: 9424 - RNA, 20 nt, synthetic construct
  misc_feature 1..20: note = source = /note="Description of Artificial Sequence: Synthetic oligonucleotide"
  source 1..20: mol_type = other RNA
cacttggtggaaaaggtgtc

SEQ ID NO: 9425 - RNA, 20 nt, synthetic construct
  misc_feature 1..20: note = source = /note="Description of Artificial Sequence: Synthetic oligonucleotide"
  source 1..20: mol_type = other RNA
atagaaatgaaatagattga

SEQ ID NO: 9426 - RNA, 20 nt, synthetic construct
  misc_feature 1..20: note = source = /note="Description of Artificial Sequence: Synthetic oligonucleotide"
  source 1..20: mol_type = other RNA
ggaccttctagggtgatcat

SEQ ID NO: 9427 - RNA, 20 nt, synthetic construct
  misc_feature 1..20: note = source = /note="Description of Artificial Sequence: Synthetic oligonucleotide"
  source 1..20: mol_type = other RNA
actggacaaaccatcaaagg

SEQ ID NO: 9428 - RNA, 20 nt, synthetic construct
  misc_feature 1..20: note = source = /note="Description of Artificial Sequence: Synthetic oligonucleotide"
  source 1..20: mol_type = other RNA
gaatgtaataaactggacaa

SEQ ID NO: 9429 - RNA, 20 nt, synthetic construct
  misc_feature 1..20: note = source = /note="Description of Artificial Sequence: Synthetic oligonucleotide"
  source 1..20: mol_type = other RNA
acctatatgagatctgacca

SEQ ID NO: 9430 - RNA, 20 nt, synthetic construct
  misc_feature 1..20: note = source = /note="Description of Artificial Sequence: Synthetic oligonucleotide"
  source 1..20: mol_type = other RNA
accaacctatatgagatctg

SEQ ID NO: 9431 - RNA, 20 nt, synthetic construct
  misc_feature 1..20: note = source = /note="Description of Artificial Sequence: Synthetic oligonucleotide"
  source 1..20: mol_type = other RNA
gatctcctccggtctaacca

SEQ ID NO: 9432 - RNA, 20 nt, synthetic construct
  misc_feature 1..20: note = source = /note="Description of Artificial Sequence: Synthetic oligonucleotide"
  source 1..20: mol_type = other RNA
cggtgatctcctccggtcta

SEQ ID NO: 9433 - RNA, 20 nt, synthetic construct
  misc_feature 1..20: note = source = /note="Description of Artificial Sequence: Synthetic oligonucleotide"
  source 1..20: mol_type = other RNA
tcggtccgacggtgatctcc

SEQ ID NO: 9434 - RNA, 20 nt, synthetic construct
  misc_feature 1..20: note = source = /note="Description of Artificial Sequence: Synthetic oligonucleotide"
  source 1..20: mol_type = other RNA
tcgtcggtccgacggtgatc

SEQ ID NO: 9435 - RNA, 20 nt, synthetic construct
  misc_feature 1..20: note = source = /note="Description of Artificial Sequence: Synthetic oligonucleotide"
  source 1..20: mol_type = other RNA
ataatacttttcgtcgtcgg

SEQ ID NO: 9436 - RNA, 20 nt, synthetic construct
  misc_feature 1..20: note = source = /note="Description of Artificial Sequence: Synthetic oligonucleotide"
  source 1..20: mol_type = other RNA
attgaaaggggtgtcgagat

SEQ ID NO: 9437 - RNA, 20 nt, synthetic construct
  misc_feature 1..20: note = source = /note="Description of Artificial Sequence: Synthetic oligonucleotide"
  source 1..20: mol_type = other RNA
tcactcttctcactcgagac

SEQ ID NO: 9438 - RNA, 20 nt, synthetic construct
  misc_feature 1..20: note = source = /note="Description of Artificial Sequence: Synthetic oligonucleotide"
  source 1..20: mol_type = other RNA
acaagttccctttttttctg

SEQ ID NO: 9439 - RNA, 20 nt, synthetic construct
  misc_feature 1..20: note = source = /note="Description of Artificial Sequence: Synthetic oligonucleotide"
  source 1..20: mol_type = other RNA
atatccctcttaaacaagtt

SEQ ID NO: 9440 - RNA, 20 nt, synthetic construct
  misc_feature 1..20: note = source = /note="Description of Artificial Sequence: Synthetic oligonucleotide"
  source 1..20: mol_type = other RNA
tatatccctcttaaacaagt

SEQ ID NO: 9441 - RNA, 20 nt, synthetic construct
  misc_feature 1..20: note = source = /note="Description of Artificial Sequence: Synthetic oligonucleotide"
  source 1..20: mol_type = other RNA
tttttcgaacgtcgttatat

SEQ ID NO: 9442 - RNA, 20 nt, synthetic construct
  misc_feature 1..20: note = source = /note="Description of Artificial Sequence: Synthetic oligonucleotide"
  source 1..20: mol_type = other RNA
gtttttcgaacgtcgttata

SEQ ID NO: 9443 - RNA, 20 nt, synthetic construct
  misc_feature 1..20: note = source = /note="Description of Artificial Sequence: Synthetic oligonucleotide"
  source 1..20: mol_type = other RNA
tcttagtcgaaaaagtctag

SEQ ID NO: 9444 - RNA, 20 nt, synthetic construct
  misc_feature 1..20: note = source = /note="Description of Artificial Sequence: Synthetic oligonucleotide"
  source 1..20: mol_type = other RNA
agtcgtttttaccgtcttat

SEQ ID NO: 9445 - RNA, 20 nt, synthetic construct
  misc_feature 1..20: note = source = /note="Description of Artificial Sequence: Synthetic oligonucleotide"
  source 1..20: mol_type = other RNA
aaatgtctacagtcgttttt

SEQ ID NO: 9446 - RNA, 20 nt, synthetic construct
  misc_feature 1..20: note = source = /note="Description of Artificial Sequence: Synthetic oligonucleotide"
  source 1..20: mol_type = other RNA
aaggtcgattatttacgttt

SEQ ID NO: 9447 - RNA, 20 nt, synthetic construct
  misc_feature 1..20: note = source = /note="Description of Artificial Sequence: Synthetic oligonucleotide"
  source 1..20: mol_type = other RNA
taccattgattgccaactac

SEQ ID NO: 9448 - RNA, 20 nt, synthetic construct
  misc_feature 1..20: note = source = /note="Description of Artificial Sequence: Synthetic oligonucleotide"
  source 1..20: mol_type = other RNA
gatataatttaccattgatt

SEQ ID NO: 9449 - RNA, 20 nt, synthetic construct
  misc_feature 1..20: note = source = /note="Description of Artificial Sequence: Synthetic oligonucleotide"
  source 1..20: mol_type = other RNA
aagaatgtttgatataattt

SEQ ID NO: 9450 - RNA, 20 nt, synthetic construct
  misc_feature 1..20: note = source = /note="Description of Artificial Sequence: Synthetic oligonucleotide"
  source 1..20: mol_type = other RNA
cattactgtggaggtatcgt

SEQ ID NO: 9451 - RNA, 20 nt, synthetic construct
  misc_feature 1..20: note = source = /note="Description of Artificial Sequence: Synthetic oligonucleotide"
  source 1..20: mol_type = other RNA
tcattactgtggaggtatcg

SEQ ID NO: 9452 - RNA, 20 nt, synthetic construct
  misc_feature 1..20: note = source = /note="Description of Artificial Sequence: Synthetic oligonucleotide"
  source 1..20: mol_type = other RNA
tatgagacagttgatactta

SEQ ID NO: 9453 - RNA, 20 nt, synthetic construct
  misc_feature 1..20: note = source = /note="Description of Artificial Sequence: Synthetic oligonucleotide"
  source 1..20: mol_type = other RNA
tgaatgttcttttttataag

SEQ ID NO: 9454 - RNA, 20 nt, synthetic construct
  misc_feature 1..20: note = source = /note="Description of Artificial Sequence: Synthetic oligonucleotide"
  source 1..20: mol_type = other RNA
ctcacgatccaggatcaaag

SEQ ID NO: 9455 - RNA, 20 nt, synthetic construct
  misc_feature 1..20: note = source = /note="Description of Artificial Sequence: Synthetic oligonucleotide"
  source 1..20: mol_type = other RNA
aactacccgtaaactcacga

SEQ ID NO: 9456 - RNA, 20 nt, synthetic construct
  misc_feature 1..20: note = source = /note="Description of Artificial Sequence: Synthetic oligonucleotide"
  source 1..20: mol_type = other RNA
acttaataagatggtaacta

SEQ ID NO: 9457 - RNA, 20 nt, synthetic construct
  misc_feature 1..20: note = source = /note="Description of Artificial Sequence: Synthetic oligonucleotide"
  source 1..20: mol_type = other RNA
tacttaataagatggtaact

SEQ ID NO: 9458 - RNA, 20 nt, synthetic construct
  misc_feature 1..20: note = source = /note="Description of Artificial Sequence: Synthetic oligonucleotide"
  source 1..20: mol_type = other RNA
cacgaaaaaggtaatacaaa

SEQ ID NO: 9459 - RNA, 20 nt, synthetic construct
  misc_feature 1..20: note = source = /note="Description of Artificial Sequence: Synthetic oligonucleotide"
  source 1..20: mol_type = other RNA
acacgaaaaaggtaatacaa

SEQ ID NO: 9460 - RNA, 20 nt, synthetic construct
  misc_feature 1..20: note = source = /note="Description of Artificial Sequence: Synthetic oligonucleotide"
  source 1..20: mol_type = other RNA
ttgatatatacataggtatt

SEQ ID NO: 9461 - RNA, 20 nt, synthetic construct
  misc_feature 1..20: note = source = /note="Description of Artificial Sequence: Synthetic oligonucleotide"
  source 1..20: mol_type = other RNA
aaaatacttgatatatacat

SEQ ID NO: 9462 - RNA, 20 nt, synthetic construct
  misc_feature 1..20: note = source = /note="Description of Artificial Sequence: Synthetic oligonucleotide"
  source 1..20: mol_type = other RNA
agggtttatcgaccttgata

SEQ ID NO: 9463 - RNA, 20 nt, synthetic construct
  misc_feature 1..20: note = source = /note="Description of Artificial Sequence: Synthetic oligonucleotide"
  source 1..20: mol_type = other RNA
cggagtcggagggtttatcg

SEQ ID NO: 9464 - RNA, 20 nt, synthetic construct
  misc_feature 1..20: note = source = /note="Description of Artificial Sequence: Synthetic oligonucleotide"
  source 1..20: mol_type = other RNA
gtccaacttggacttgaaga

SEQ ID NO: 9465 - RNA, 20 nt, synthetic construct
  misc_feature 1..20: note = source = /note="Description of Artificial Sequence: Synthetic oligonucleotide"
  source 1..20: mol_type = other RNA
agtccaacttggacttgaag

SEQ ID NO: 9466 - RNA, 20 nt, synthetic construct
  misc_feature 1..20: note = source = /note="Description of Artificial Sequence: Synthetic oligonucleotide"
  source 1..20: mol_type = other RNA
ccccagaacgatacaacgag

SEQ ID NO: 9467 - RNA, 20 nt, synthetic construct
  misc_feature 1..20: note = source = /note="Description of Artificial Sequence: Synthetic oligonucleotide"
  source 1..20: mol_type = other RNA
tgcaaagaaaaaatgtctac

SEQ ID NO: 9468 - RNA, 20 nt, synthetic construct
  misc_feature 1..20: note = source = /note="Description of Artificial Sequence: Synthetic oligonucleotide"
  source 1..20: mol_type = other RNA
atgcaaagaaaaaatgtcta

SEQ ID NO: 9469 - RNA, 20 nt, synthetic construct
  misc_feature 1..20: note = source = /note="Description of Artificial Sequence: Synthetic oligonucleotide"
  source 1..20: mol_type = other RNA
aatgcaaagaaaaaatgtct

SEQ ID NO: 9470 - RNA, 20 nt, synthetic construct
  misc_feature 1..20: note = source = /note="Description of Artificial Sequence: Synthetic oligonucleotide"
  source 1..20: mol_type = other RNA
tgttttataaatgatagggg

SEQ ID NO: 9471 - RNA, 20 nt, synthetic construct
  misc_feature 1..20: note = source = /note="Description of Artificial Sequence: Synthetic oligonucleotide"
  source 1..20: mol_type = other RNA
tattaaaatgtcaaatgttt

SEQ ID NO: 9472 - RNA, 20 nt, synthetic construct
  misc_feature 1..20: note = source = /note="Description of Artificial Sequence: Synthetic oligonucleotide"
  source 1..20: mol_type = other RNA
agattgagacataattcgac

SEQ ID NO: 9473 - RNA, 20 nt, synthetic construct
  misc_feature 1..20: note = source = /note="Description of Artificial Sequence: Synthetic oligonucleotide"
  source 1..20: mol_type = other RNA
ggctgtgcagctgatattat

SEQ ID NO: 9474 - RNA, 20 nt, synthetic construct
  misc_feature 1..20: note = source = /note="Description of Artificial Sequence: Synthetic oligonucleotide"
  source 1..20: mol_type = other RNA
tgctatggatagcattatat

SEQ ID NO: 9475 - RNA, 20 nt, synthetic construct
  misc_feature 1..20: note = source = /note="Description of Artificial Sequence: Synthetic oligonucleotide"
  source 1..20: mol_type = other RNA
gtgaacaatatgacatatct

SEQ ID NO: 9476 - RNA, 20 nt, synthetic construct
  misc_feature 1..20: note = source = /note="Description of Artificial Sequence: Synthetic oligonucleotide"
  source 1..20: mol_type = other RNA
atacacactattttttaagt

SEQ ID NO: 9477 - RNA, 20 nt, synthetic construct
  misc_feature 1..20: note = source = /note="Description of Artificial Sequence: Synthetic oligonucleotide"
  source 1..20: mol_type = other RNA
agcaacaaaaacttcctctt

SEQ ID NO: 9478 - RNA, 20 nt, synthetic construct
  misc_feature 1..20: note = source = /note="Description of Artificial Sequence: Synthetic oligonucleotide"
  source 1..20: mol_type = other RNA
tgttaattccaaagttttaa

SEQ ID NO: 9479 - RNA, 20 nt, synthetic construct
  misc_feature 1..20: note = source = /note="Description of Artificial Sequence: Synthetic oligonucleotide"
  source 1..20: mol_type = other RNA
gttaattccaaagttttaaa

SEQ ID NO: 9480 - RNA, 20 nt, synthetic construct
  misc_feature 1..20: note = source = /note="Description of Artificial Sequence: Synthetic oligonucleotide"
  source 1..20: mol_type = other RNA
ttaattccaaagttttaaag

SEQ ID NO: 9481 - RNA, 20 nt, synthetic construct
  misc_feature 1..20: note = source = /note="Description of Artificial Sequence: Synthetic oligonucleotide"
  source 1..20: mol_type = other RNA
tgttaaaactaaatgagaat

SEQ ID NO: 9482 - RNA, 20 nt, synthetic construct
  misc_feature 1..20: note = source = /note="Description of Artificial Sequence: Synthetic oligonucleotide"
  source 1..20: mol_type = other RNA
catattttgactctgaatta

SEQ ID NO: 9483 - RNA, 20 nt, synthetic construct
  misc_feature 1..20: note = source = /note="Description of Artificial Sequence: Synthetic oligonucleotide"
  source 1..20: mol_type = other RNA
attttaatataactctgtaa

SEQ ID NO: 9484 - RNA, 20 nt, synthetic construct
  misc_feature 1..20: note = source = /note="Description of Artificial Sequence: Synthetic oligonucleotide"
  source 1..20: mol_type = other RNA
aactctgtaatggaaataaa

SEQ ID NO: 9485 - RNA, 20 nt, synthetic construct
  misc_feature 1..20: note = source = /note="Description of Artificial Sequence: Synthetic oligonucleotide"
  source 1..20: mol_type = other RNA
taatttctcactgaagtcat

SEQ ID NO: 9486 - RNA, 20 nt, synthetic construct
  misc_feature 1..20: note = source = /note="Description of Artificial Sequence: Synthetic oligonucleotide"
  source 1..20: mol_type = other RNA
ttgataaatttaacaacttt

SEQ ID NO: 9487 - RNA, 20 nt, synthetic construct
  misc_feature 1..20: note = source = /note="Description of Artificial Sequence: Synthetic oligonucleotide"
  source 1..20: mol_type = other RNA
tgataaatttaacaactttt

SEQ ID NO: 9488 - RNA, 20 nt, synthetic construct
  misc_feature 1..20: note = source = /note="Description of Artificial Sequence: Synthetic oligonucleotide"
  source 1..20: mol_type = other RNA
taaatttaacaacttttggg

SEQ ID NO: 9489 - RNA, 20 nt, synthetic construct
  misc_feature 1..20: note = source = /note="Description of Artificial Sequence: Synthetic oligonucleotide"
  source 1..20: mol_type = other RNA
tagatacttcttgacttatg

SEQ ID NO: 9490 - RNA, 20 nt, synthetic construct
  misc_feature 1..20: note = source = /note="Description of Artificial Sequence: Synthetic oligonucleotide"
  source 1..20: mol_type = other RNA
aaaaaaaacgaagccattat

SEQ ID NO: 9491 - RNA, 20 nt, synthetic construct
  misc_feature 1..20: note = source = /note="Description of Artificial Sequence: Synthetic oligonucleotide"
  source 1..20: mol_type = other RNA
aaacgaagccattataggtc

SEQ ID NO: 9492 - RNA, 20 nt, synthetic construct
  misc_feature 1..20: note = source = /note="Description of Artificial Sequence: Synthetic oligonucleotide"
  source 1..20: mol_type = other RNA
aacgaagccattataggtca

SEQ ID NO: 9493 - RNA, 20 nt, synthetic construct
  misc_feature 1..20: note = source = /note="Description of Artificial Sequence: Synthetic oligonucleotide"
  source 1..20: mol_type = other RNA
tcacagtataagttttttaa

SEQ ID NO: 9494 - RNA, 20 nt, synthetic construct
  misc_feature 1..20: note = source = /note="Description of Artificial Sequence: Synthetic oligonucleotide"
  source 1..20: mol_type = other RNA
aaatgtttatcactttcacg

SEQ ID NO: 9495 - RNA, 20 nt, synthetic construct
  misc_feature 1..20: note = source = /note="Description of Artificial Sequence: Synthetic oligonucleotide"
  source 1..20: mol_type = other RNA
ttcatgtaaaccaaatccag

SEQ ID NO: 9496 - RNA, 20 nt, synthetic construct
  misc_feature 1..20: note = source = /note="Description of Artificial Sequence: Synthetic oligonucleotide"
  source 1..20: mol_type = other RNA
aagtaacttattgcctctgt

SEQ ID NO: 9497 - RNA, 20 nt, synthetic construct
  misc_feature 1..20: note = source = /note="Description of Artificial Sequence: Synthetic oligonucleotide"
  source 1..20: mol_type = other RNA
agtaacttattgcctctgtt

SEQ ID NO: 9498 - RNA, 20 nt, synthetic construct
  misc_feature 1..20: note = source = /note="Description of Artificial Sequence: Synthetic oligonucleotide"
  source 1..20: mol_type = other RNA
acttattgcctctgttgggt

SEQ ID NO: 9499 - RNA, 20 nt, synthetic construct
  misc_feature 1..20: note = source = /note="Description of Artificial Sequence: Synthetic oligonucleotide"
  source 1..20: mol_type = other RNA
ctaaaatttacatctctgcc

SEQ ID NO: 9500 - RNA, 20 nt, synthetic construct
  misc_feature 1..20: note = source = /note="Description of Artificial Sequence: Synthetic oligonucleotide"
  source 1..20: mol_type = other RNA
aaatttacatctctgccagg

SEQ ID NO: 9501 - RNA, 20 nt, synthetic construct
  misc_feature 1..20: note = source = /note="Description of Artificial Sequence: Synthetic oligonucleotide"
  source 1..20: mol_type = other RNA
tgaagacttctaagtataaa

SEQ ID NO: 9502 - RNA, 20 nt, synthetic construct
  misc_feature 1..20: note = source = /note="Description of Artificial Sequence: Synthetic oligonucleotide"
  source 1..20: mol_type = other RNA
ttttttaacagtatattact

SEQ ID NO: 9503 - RNA, 20 nt, synthetic construct
  misc_feature 1..20: note = source = /note="Description of Artificial Sequence: Synthetic oligonucleotide"
  source 1..20: mol_type = other RNA
aaaatctgttcttcatgagc

SEQ ID NO: 9504 - RNA, 20 nt, synthetic construct
  misc_feature 1..20: note = source = /note="Description of Artificial Sequence: Synthetic oligonucleotide"
  source 1..20: mol_type = other RNA
aaatctgttcttcatgagca

SEQ ID NO: 9505 - RNA, 20 nt, synthetic construct
  misc_feature 1..20: note = source = /note="Description of Artificial Sequence: Synthetic oligonucleotide"
  source 1..20: mol_type = other RNA
ctgttcttcatgagcagggc

SEQ ID NO: 9506 - RNA, 20 nt, synthetic construct
  misc_feature 1..20: note = source = /note="Description of Artificial Sequence: Synthetic oligonucleotide"
  source 1..20: mol_type = other RNA
ttcttcatgagcagggcagg

SEQ ID NO: 9507 - RNA, 20 nt, synthetic construct
  misc_feature 1..20: note = source = /note="Description of Artificial Sequence: Synthetic oligonucleotide"
  source 1..20: mol_type = other RNA
tcttcatgagcagggcaggt

SEQ ID NO: 9508 - RNA, 20 nt, synthetic construct
  misc_feature 1..20: note = source = /note="Description of Artificial Sequence: Synthetic oligonucleotide"
  source 1..20: mol_type = other RNA
cttcatgagcagggcaggtg

SEQ ID NO: 9509 - RNA, 20 nt, synthetic construct
  misc_feature 1..20: note = source = /note="Description of Artificial Sequence: Synthetic oligonucleotide"
  source 1..20: mol_type = other RNA
ttcatgagcagggcaggtgg

SEQ ID NO: 9510 - RNA, 20 nt, synthetic construct
  misc_feature 1..20: note = source = /note="Description of Artificial Sequence: Synthetic oligonucleotide"
  source 1..20: mol_type = other RNA
ctttcaagtaaattctgcaa

SEQ ID NO: 9511 - RNA, 20 nt, synthetic construct
  misc_feature 1..20: note = source = /note="Description of Artificial Sequence: Synthetic oligonucleotide"
  source 1..20: mol_type = other RNA
agtaaattttagttgctcta

SEQ ID NO: 9512 - RNA, 20 nt, synthetic construct
  misc_feature 1..20: note = source = /note="Description of Artificial Sequence: Synthetic oligonucleotide"
  source 1..20: mol_type = other RNA
ttttaatagttcatcttcct

SEQ ID NO: 9513 - RNA, 20 nt, synthetic construct
  misc_feature 1..20: note = source = /note="Description of Artificial Sequence: Synthetic oligonucleotide"
  source 1..20: mol_type = other RNA
gtgacctctttaagaccata

SEQ ID NO: 9514 - RNA, 20 nt, synthetic construct
  misc_feature 1..20: note = source = /note="Description of Artificial Sequence: Synthetic oligonucleotide"
  source 1..20: mol_type = other RNA
aattcccctaaccctactcc

SEQ ID NO: 9515 - RNA, 20 nt, synthetic construct
  misc_feature 1..20: note = source = /note="Description of Artificial Sequence: Synthetic oligonucleotide"
  source 1..20: mol_type = other RNA
cctaaccctactcctggcac

SEQ ID NO: 9516 - RNA, 20 nt, synthetic construct
  misc_feature 1..20: note = source = /note="Description of Artificial Sequence: Synthetic oligonucleotide"
  source 1..20: mol_type = other RNA
gatgctttatttagtaataa

SEQ ID NO: 9517 - RNA, 20 nt, synthetic construct
  misc_feature 1..20: note = source = /note="Description of Artificial Sequence: Synthetic oligonucleotide"
  source 1..20: mol_type = other RNA
aaggcaccatatattgtgtt

SEQ ID NO: 9518 - RNA, 20 nt, synthetic construct
  misc_feature 1..20: note = source = /note="Description of Artificial Sequence: Synthetic oligonucleotide"
  source 1..20: mol_type = other RNA
aggcaccatatattgtgttt

SEQ ID NO: 9519 - RNA, 20 nt, synthetic construct
  misc_feature 1..20: note = source = /note="Description of Artificial Sequence: Synthetic oligonucleotide"
  source 1..20: mol_type = other RNA
tgtttgggattcaaaatgta

SEQ ID NO: 9520 - RNA, 20 nt, synthetic construct
  misc_feature 1..20: note = source = /note="Description of Artificial Sequence: Synthetic oligonucleotide"
  source 1..20: mol_type = other RNA
gtttgggattcaaaatgtaa

SEQ ID NO: 9521 - RNA, 20 nt, synthetic construct
  misc_feature 1..20: note = source = /note="Description of Artificial Sequence: Synthetic oligonucleotide"
  source 1..20: mol_type = other RNA
tttgggattcaaaatgtaag

SEQ ID NO: 9522 - RNA, 20 nt, synthetic construct
  misc_feature 1..20: note = source = /note="Description of Artificial Sequence: Synthetic oligonucleotide"
  source 1..20: mol_type = other RNA
tctcttttacatagagaaaa

SEQ ID NO: 9523 - RNA, 20 nt, synthetic construct
  misc_feature 1..20: note = source = /note="Description of Artificial Sequence: Synthetic oligonucleotide"
  source 1..20: mol_type = other RNA
gaagtaaacaaacctctttt

SEQ ID NO: 9524 - RNA, 20 nt, synthetic construct
  misc_feature 1..20: note = source = /note="Description of Artificial Sequence: Synthetic oligonucleotide"
  source 1..20: mol_type = other RNA
ggaagtaaacaaacctcttt

SEQ ID NO: 9525 - RNA, 20 nt, synthetic construct
  misc_feature 1..20: note = source = /note="Description of Artificial Sequence: Synthetic oligonucleotide"
  source 1..20: mol_type = other RNA
aaataaagcgattatacatc

SEQ ID NO: 9526 - RNA, 20 nt, synthetic construct
  misc_feature 1..20: note = source = /note="Description of Artificial Sequence: Synthetic oligonucleotide"
  source 1..20: mol_type = other RNA
atagtgtgtatctacagttt

SEQ ID NO: 9527 - RNA, 20 nt, synthetic construct
  misc_feature 1..20: note = source = /note="Description of Artificial Sequence: Synthetic oligonucleotide"
  source 1..20: mol_type = other RNA
aatagtgtgtatctacagtt

SEQ ID NO: 9528 - RNA, 20 nt, synthetic construct
  misc_feature 1..20: note = source = /note="Description of Artificial Sequence: Synthetic oligonucleotide"
  source 1..20: mol_type = other RNA
tcaaattttatctattattt

SEQ ID NO: 9529 - RNA, 20 nt, synthetic construct
  misc_feature 1..20: note = source = /note="Description of Artificial Sequence: Synthetic oligonucleotide"
  source 1..20: mol_type = other RNA
attaacataaaagaccaaag

SEQ ID NO: 9530 - RNA, 20 nt, synthetic construct
  misc_feature 1..20: note = source = /note="Description of Artificial Sequence: Synthetic oligonucleotide"
  source 1..20: mol_type = other RNA
gtgacacccctttaaaactt

SEQ ID NO: 9531 - RNA, 20 nt, synthetic construct
  misc_feature 1..20: note = source = /note="Description of Artificial Sequence: Synthetic oligonucleotide"
  source 1..20: mol_type = other RNA
cacataaatgtgactaaaaa

SEQ ID NO: 9532 - RNA, 20 nt, synthetic construct
  misc_feature 1..20: note = source = /note="Description of Artificial Sequence: Synthetic oligonucleotide"
  source 1..20: mol_type = other RNA
tcattttacaacggatttat

SEQ ID NO: 9533 - RNA, 20 nt, synthetic construct
  misc_feature 1..20: note = source = /note="Description of Artificial Sequence: Synthetic oligonucleotide"
  source 1..20: mol_type = other RNA
aatggattttcattttacaa

SEQ ID NO: 9534 - RNA, 20 nt, synthetic construct
  misc_feature 1..20: note = source = /note="Description of Artificial Sequence: Synthetic oligonucleotide"
  source 1..20: mol_type = other RNA
ccaaataacccggtattaaa

SEQ ID NO: 9535 - RNA, 20 nt, synthetic construct
  misc_feature 1..20: note = source = /note="Description of Artificial Sequence: Synthetic oligonucleotide"
  source 1..20: mol_type = other RNA
gaaatcctacccaaataacc

SEQ ID NO: 9536 - RNA, 20 nt, synthetic construct
  misc_feature 1..20: note = source = /note="Description of Artificial Sequence: Synthetic oligonucleotide"
  source 1..20: mol_type = other RNA
tgaaatcctacccaaataac

SEQ ID NO: 9537 - RNA, 20 nt, synthetic construct
  misc_feature 1..20: note = source = /note="Description of Artificial Sequence: Synthetic oligonucleotide"
  source 1..20: mol_type = other RNA
atgaaatcctacccaaataa

SEQ ID NO: 9538 - RNA, 20 nt, synthetic construct
  misc_feature 1..20: note = source = /note="Description of Artificial Sequence: Synthetic oligonucleotide"
  source 1..20: mol_type = other RNA
aatgaaatcctacccaaata

SEQ ID NO: 9539 - RNA, 20 nt, synthetic construct
  misc_feature 1..20: note = source = /note="Description of Artificial Sequence: Synthetic oligonucleotide"
  source 1..20: mol_type = other RNA
aaaaaaaaaatgaaatccta

SEQ ID NO: 9540 - RNA, 20 nt, synthetic construct
  misc_feature 1..20: note = source = /note="Description of Artificial Sequence: Synthetic oligonucleotide"
  source 1..20: mol_type = other RNA
caaaaaaaaaatgaaatcct

SEQ ID NO: 9541 - RNA, 20 nt, synthetic construct
  misc_feature 1..20: note = source = /note="Description of Artificial Sequence: Synthetic oligonucleotide"
  source 1..20: mol_type = other RNA
gaagcaaaaaaaaaatgaaa

SEQ ID NO: 9542 - RNA, 20 nt, synthetic construct
  misc_feature 1..20: note = source = /note="Description of Artificial Sequence: Synthetic oligonucleotide"
  source 1..20: mol_type = other RNA
tctgtcagggactggatatt

SEQ ID NO: 9543 - RNA, 20 nt, synthetic construct
  misc_feature 1..20: note = source = /note="Description of Artificial Sequence: Synthetic oligonucleotide"
  source 1..20: mol_type = other RNA
ttctcatcattcaattagta

SEQ ID NO: 9544 - RNA, 20 nt, synthetic construct
  misc_feature 1..20: note = source = /note="Description of Artificial Sequence: Synthetic oligonucleotide"
  source 1..20: mol_type = other RNA
gctaaatgctaaatatactg

SEQ ID NO: 9545 - RNA, 20 nt, synthetic construct
  misc_feature 1..20: note = source = /note="Description of Artificial Sequence: Synthetic oligonucleotide"
  source 1..20: mol_type = other RNA
cattagaatgactgaaaatg

SEQ ID NO: 9546 - RNA, 20 nt, synthetic construct
  misc_feature 1..20: note = source = /note="Description of Artificial Sequence: Synthetic oligonucleotide"
  source 1..20: mol_type = other RNA
atgttataatatctatagta

SEQ ID NO: 9547 - RNA, 20 nt, synthetic construct
  misc_feature 1..20: note = source = /note="Description of Artificial Sequence: Synthetic oligonucleotide"
  source 1..20: mol_type = other RNA
taacaaattcttcatttaaa

SEQ ID NO: 9548 - RNA, 20 nt, synthetic construct
  misc_feature 1..20: note = source = /note="Description of Artificial Sequence: Synthetic oligonucleotide"
  source 1..20: mol_type = other RNA
ttaacaaattcttcatttaa

SEQ ID NO: 9549 - RNA, 20 nt, synthetic construct
  misc_feature 1..20: note = source = /note="Description of Artificial Sequence: Synthetic oligonucleotide"
  source 1..20: mol_type = other RNA
tagtaagtgaaagcttaata

SEQ ID NO: 9550 - RNA, 20 nt, synthetic construct
  misc_feature 1..20: note = source = /note="Description of Artificial Sequence: Synthetic oligonucleotide"
  source 1..20: mol_type = other RNA
aaaacttatactgtgatttc

SEQ ID NO: 9551 - RNA, 20 nt, synthetic construct
  misc_feature 1..20: note = source = /note="Description of Artificial Sequence: Synthetic oligonucleotide"
  source 1..20: mol_type = other RNA
tttatcacttgataaaacag

SEQ ID NO: 9552 - RNA, 20 nt, synthetic construct
  misc_feature 1..20: note = source = /note="Description of Artificial Sequence: Synthetic oligonucleotide"
  source 1..20: mol_type = other RNA
tacttggtatcctctggatt

SEQ ID NO: 9553 - RNA, 20 nt, synthetic construct
  misc_feature 1..20: note = source = /note="Description of Artificial Sequence: Synthetic oligonucleotide"
  source 1..20: mol_type = other RNA
ataagttacttggtatcctc

SEQ ID NO: 9554 - RNA, 20 nt, synthetic construct
  misc_feature 1..20: note = source = /note="Description of Artificial Sequence: Synthetic oligonucleotide"
  source 1..20: mol_type = other RNA
aacagaggcaataagttact

SEQ ID NO: 9555 - RNA, 20 nt, synthetic construct
  misc_feature 1..20: note = source = /note="Description of Artificial Sequence: Synthetic oligonucleotide"
  source 1..20: mol_type = other RNA
agagctctcctacccaacag

SEQ ID NO: 9556 - RNA, 20 nt, synthetic construct
  misc_feature 1..20: note = source = /note="Description of Artificial Sequence: Synthetic oligonucleotide"
  source 1..20: mol_type = other RNA
gtaaattttagaaggtgagg

SEQ ID NO: 9557 - RNA, 20 nt, synthetic construct
  misc_feature 1..20: note = source = /note="Description of Artificial Sequence: Synthetic oligonucleotide"
  source 1..20: mol_type = other RNA
gatgtaaattttagaaggtg

SEQ ID NO: 9558 - RNA, 20 nt, synthetic construct
  misc_feature 1..20: note = source = /note="Description of Artificial Sequence: Synthetic oligonucleotide"
  source 1..20: mol_type = other RNA
gcagagatgtaaattttaga

SEQ ID NO: 9559 - RNA, 20 nt, synthetic construct
  misc_feature 1..20: note = source = /note="Description of Artificial Sequence: Synthetic oligonucleotide"
  source 1..20: mol_type = other RNA
agttgtgagacataaccacc

SEQ ID NO: 9560 - RNA, 20 nt, synthetic construct
  misc_feature 1..20: note = source = /note="Description of Artificial Sequence: Synthetic oligonucleotide"
  source 1..20: mol_type = other RNA
atatactgttaaaaaatggt

SEQ ID NO: 9561 - RNA, 20 nt, synthetic construct
  misc_feature 1..20: note = source = /note="Description of Artificial Sequence: Synthetic oligonucleotide"
  source 1..20: mol_type = other RNA
agtaatatactgttaaaaaa

SEQ ID NO: 9562 - RNA, 20 nt, synthetic construct
  misc_feature 1..20: note = source = /note="Description of Artificial Sequence: Synthetic oligonucleotide"
  source 1..20: mol_type = other RNA
ttgcagaatttacttgaaag

SEQ ID NO: 9563 - RNA, 20 nt, synthetic construct
  misc_feature 1..20: note = source = /note="Description of Artificial Sequence: Synthetic oligonucleotide"
  source 1..20: mol_type = other RNA
tttgcagaatttacttgaaa

SEQ ID NO: 9564 - RNA, 20 nt, synthetic construct
  misc_feature 1..20: note = source = /note="Description of Artificial Sequence: Synthetic oligonucleotide"
  source 1..20: mol_type = other RNA
ctttgcagaatttacttgaa

SEQ ID NO: 9565 - RNA, 20 nt, synthetic construct
  misc_feature 1..20: note = source = /note="Description of Artificial Sequence: Synthetic oligonucleotide"
  source 1..20: mol_type = other RNA
atgcttcagaactagaatgc

SEQ ID NO: 9566 - RNA, 20 nt, synthetic construct
  misc_feature 1..20: note = source = /note="Description of Artificial Sequence: Synthetic oligonucleotide"
  source 1..20: mol_type = other RNA
tttactggacacttcaaata

SEQ ID NO: 9567 - RNA, 20 nt, synthetic construct
  misc_feature 1..20: note = source = /note="Description of Artificial Sequence: Synthetic oligonucleotide"
  source 1..20: mol_type = other RNA
atagagcaactaaaatttac

SEQ ID NO: 9568 - RNA, 20 nt, synthetic construct
  misc_feature 1..20: note = source = /note="Description of Artificial Sequence: Synthetic oligonucleotide"
  source 1..20: mol_type = other RNA
aagatagtatttaaataatt

SEQ ID NO: 9569 - RNA, 20 nt, synthetic construct
  misc_feature 1..20: note = source = /note="Description of Artificial Sequence: Synthetic oligonucleotide"
  source 1..20: mol_type = other RNA
gtcacattttttagctacca

SEQ ID NO: 9570 - RNA, 20 nt, synthetic construct
  misc_feature 1..20: note = source = /note="Description of Artificial Sequence: Synthetic oligonucleotide"
  source 1..20: mol_type = other RNA
taagccgtatggtcttaaag

SEQ ID NO: 9571 - RNA, 20 nt, synthetic construct
  misc_feature 1..20: note = source = /note="Description of Artificial Sequence: Synthetic oligonucleotide"
  source 1..20: mol_type = other RNA
gttaggggaattaagccgta

SEQ ID NO: 9572 - RNA, 20 nt, synthetic construct
  misc_feature 1..20: note = source = /note="Description of Artificial Sequence: Synthetic oligonucleotide"
  source 1..20: mol_type = other RNA
tgtgccaggagtagggttag

SEQ ID NO: 9573 - RNA, 20 nt, synthetic construct
  misc_feature 1..20: note = source = /note="Description of Artificial Sequence: Synthetic oligonucleotide"
  source 1..20: mol_type = other RNA
ctgtgccaggagtagggtta

SEQ ID NO: 9574 - RNA, 20 nt, synthetic construct
  misc_feature 1..20: note = source = /note="Description of Artificial Sequence: Synthetic oligonucleotide"
  source 1..20: mol_type = other RNA
cctgtgccaggagtagggtt

SEQ ID NO: 9575 - RNA, 20 nt, synthetic construct
  misc_feature 1..20: note = source = /note="Description of Artificial Sequence: Synthetic oligonucleotide"
  source 1..20: mol_type = other RNA
acaagcctgtgccaggagta

SEQ ID NO: 9576 - RNA, 20 nt, synthetic construct
  misc_feature 1..20: note = source = /note="Description of Artificial Sequence: Synthetic oligonucleotide"
  source 1..20: mol_type = other RNA
cacaagcctgtgccaggagt

SEQ ID NO: 9577 - RNA, 20 nt, synthetic construct
  misc_feature 1..20: note = source = /note="Description of Artificial Sequence: Synthetic oligonucleotide"
  source 1..20: mol_type = other RNA
tatacacacaagcctgtgcc

SEQ ID NO: 9578 - RNA, 20 nt, synthetic construct
  misc_feature 1..20: note = source = /note="Description of Artificial Sequence: Synthetic oligonucleotide"
  source 1..20: mol_type = other RNA
tgaatcccaaacacaatata

SEQ ID NO: 9579 - RNA, 20 nt, synthetic construct
  misc_feature 1..20: note = source = /note="Description of Artificial Sequence: Synthetic oligonucleotide"
  source 1..20: mol_type = other RNA
aggtaagtttaaataatcat

SEQ ID NO: 9580 - RNA, 20 nt, synthetic construct
  misc_feature 1..20: note = source = /note="Description of Artificial Sequence: Synthetic oligonucleotide"
  source 1..20: mol_type = other RNA
catgcgcttctaaaagtcac

SEQ ID NO: 9581 - RNA, 20 nt, synthetic construct
  misc_feature 1..20: note = source = /note="Description of Artificial Sequence: Synthetic oligonucleotide"
  source 1..20: mol_type = other RNA
ttgtttctgtaaacagacta

SEQ ID NO: 9582 - RNA, 20 nt, synthetic construct
  misc_feature 1..20: note = source = /note="Description of Artificial Sequence: Synthetic oligonucleotide"
  source 1..20: mol_type = other RNA
gagattacatcaaaattatg

SEQ ID NO: 9583 - RNA, 20 nt, synthetic construct
  misc_feature 1..20: note = source = /note="Description of Artificial Sequence: Synthetic oligonucleotide"
  source 1..20: mol_type = other RNA
aattatgtggcccaagctat

SEQ ID NO: 9584 - RNA, 20 nt, synthetic construct
  misc_feature 1..20: note = source = /note="Description of Artificial Sequence: Synthetic oligonucleotide"
  source 1..20: mol_type = other RNA
cattgtaagtatatatattt

SEQ ID NO: 9585 - RNA, 20 nt, synthetic construct
  misc_feature 1..20: note = source = /note="Description of Artificial Sequence: Synthetic oligonucleotide"
  source 1..20: mol_type = other RNA
aaactatagctagttaagac

SEQ ID NO: 9586 - RNA, 20 nt, synthetic construct
  misc_feature 1..20: note = source = /note="Description of Artificial Sequence: Synthetic oligonucleotide"
  source 1..20: mol_type = other RNA
gttaagacaggtagatgatt

SEQ ID NO: 9587 - RNA, 20 nt, synthetic construct
  misc_feature 1..20: note = source = /note="Description of Artificial Sequence: Synthetic oligonucleotide"
  source 1..20: mol_type = other RNA
tcagaaatctctcatcatga

SEQ ID NO: 9588 - RNA, 20 nt, synthetic construct
  misc_feature 1..20: note = source = /note="Description of Artificial Sequence: Synthetic oligonucleotide"
  source 1..20: mol_type = other RNA
taaacactgtgtttagtcac

SEQ ID NO: 9589 - RNA, 20 nt, synthetic construct
  misc_feature 1..20: note = source = /note="Description of Artificial Sequence: Synthetic oligonucleotide"
  source 1..20: mol_type = other RNA
aaacactgtgtttagtcact

SEQ ID NO: 9590 - RNA, 20 nt, synthetic construct
  misc_feature 1..20: note = source = /note="Description of Artificial Sequence: Synthetic oligonucleotide"
  source 1..20: mol_type = other RNA
tttagtcactgggaacataa

SEQ ID NO: 9591 - RNA, 20 nt, synthetic construct
  misc_feature 1..20: note = source = /note="Description of Artificial Sequence: Synthetic oligonucleotide"
  source 1..20: mol_type = other RNA
tttaagaattccgtctttgc

SEQ ID NO: 9592 - RNA, 20 nt, synthetic construct
  misc_feature 1..20: note = source = /note="Description of Artificial Sequence: Synthetic oligonucleotide"
  source 1..20: mol_type = other RNA
ttaagaattccgtctttgct

SEQ ID NO: 9593 - RNA, 20 nt, synthetic construct
  misc_feature 1..20: note = source = /note="Description of Artificial Sequence: Synthetic oligonucleotide"
  source 1..20: mol_type = other RNA
aattccgtctttgctgggta

SEQ ID NO: 9594 - RNA, 20 nt, synthetic construct
  misc_feature 1..20: note = source = /note="Description of Artificial Sequence: Synthetic oligonucleotide"
  source 1..20: mol_type = other RNA
tccgtctttgctgggtacgg

SEQ ID NO: 9595 - RNA, 20 nt, synthetic construct
  misc_feature 1..20: note = source = /note="Description of Artificial Sequence: Synthetic oligonucleotide"
  source 1..20: mol_type = other RNA
cacctttaatcccaacactt

SEQ ID NO: 9596 - RNA, 20 nt, synthetic construct
  misc_feature 1..20: note = source = /note="Description of Artificial Sequence: Synthetic oligonucleotide"
  source 1..20: mol_type = other RNA
acctttaatcccaacacttt

SEQ ID NO: 9597 - RNA, 20 nt, synthetic construct
  misc_feature 1..20: note = source = /note="Description of Artificial Sequence: Synthetic oligonucleotide"
  source 1..20: mol_type = other RNA
tttaatcccaacactttggg

SEQ ID NO: 9598 - RNA, 20 nt, synthetic construct
  misc_feature 1..20: note = source = /note="Description of Artificial Sequence: Synthetic oligonucleotide"
  source 1..20: mol_type = other RNA
cccaacactttgggaggcca

SEQ ID NO: 9599 - RNA, 20 nt, synthetic construct
  misc_feature 1..20: note = source = /note="Description of Artificial Sequence: Synthetic oligonucleotide"
  source 1..20: mol_type = other RNA
acactttgggaggccaaggc

SEQ ID NO: 9600 - RNA, 20 nt, synthetic construct
  misc_feature 1..20: note = source = /note="Description of Artificial Sequence: Synthetic oligonucleotide"
  source 1..20: mol_type = other RNA
ctttgggaggccaaggcagg

SEQ ID NO: 9601 - RNA, 20 nt, synthetic construct
  misc_feature 1..20: note = source = /note="Description of Artificial Sequence: Synthetic oligonucleotide"
  source 1..20: mol_type = other RNA
caaggcaggtggatcacctg

SEQ ID NO: 9602 - RNA, 20 nt, synthetic construct
  misc_feature 1..20: note = source = /note="Description of Artificial Sequence: Synthetic oligonucleotide"
  source 1..20: mol_type = other RNA
caggtggatcacctgaggtc

SEQ ID NO: 9603 - RNA, 20 nt, synthetic construct
  misc_feature 1..20: note = source = /note="Description of Artificial Sequence: Synthetic oligonucleotide"
  source 1..20: mol_type = other RNA
ctagaccagcctgatcaaca

SEQ ID NO: 9604 - RNA, 20 nt, synthetic construct
  misc_feature 1..20: note = source = /note="Description of Artificial Sequence: Synthetic oligonucleotide"
  source 1..20: mol_type = other RNA
actaaaaatacaaaattagc

SEQ ID NO: 9605 - RNA, 20 nt, synthetic construct
  misc_feature 1..20: note = source = /note="Description of Artificial Sequence: Synthetic oligonucleotide"
  source 1..20: mol_type = other RNA
ctaaaaatacaaaattagct

SEQ ID NO: 9606 - RNA, 20 nt, synthetic construct
  misc_feature 1..20: note = source = /note="Description of Artificial Sequence: Synthetic oligonucleotide"
  source 1..20: mol_type = other RNA
aatacaaaattagctgggtg

SEQ ID NO: 9607 - RNA, 20 nt, synthetic construct
  misc_feature 1..20: note = source = /note="Description of Artificial Sequence: Synthetic oligonucleotide"
  source 1..20: mol_type = other RNA
acaaaattagctgggtgtgg

SEQ ID NO: 9608 - RNA, 20 nt, synthetic construct
  misc_feature 1..20: note = source = /note="Description of Artificial Sequence: Synthetic oligonucleotide"
  source 1..20: mol_type = other RNA
aattagctgggtgtggtggc

SEQ ID NO: 9609 - RNA, 20 nt, synthetic construct
  misc_feature 1..20: note = source = /note="Description of Artificial Sequence: Synthetic oligonucleotide"
  source 1..20: mol_type = other RNA
cacctgtaatcccagctact

SEQ ID NO: 9610 - RNA, 20 nt, synthetic construct
  misc_feature 1..20: note = source = /note="Description of Artificial Sequence: Synthetic oligonucleotide"
  source 1..20: mol_type = other RNA
tgtaatcccagctactcgga

SEQ ID NO: 9611 - RNA, 20 nt, synthetic construct
  misc_feature 1..20: note = source = /note="Description of Artificial Sequence: Synthetic oligonucleotide"
  source 1..20: mol_type = other RNA
cccagctactcggaaggcta

SEQ ID NO: 9612 - RNA, 20 nt, synthetic construct
  misc_feature 1..20: note = source = /note="Description of Artificial Sequence: Synthetic oligonucleotide"
  source 1..20: mol_type = other RNA
gctactcggaaggctaaggc

SEQ ID NO: 9613 - RNA, 20 nt, synthetic construct
  misc_feature 1..20: note = source = /note="Description of Artificial Sequence: Synthetic oligonucleotide"
  source 1..20: mol_type = other RNA
gcaggagaatagcttgaacc

SEQ ID NO: 9614 - RNA, 20 nt, synthetic construct
  misc_feature 1..20: note = source = /note="Description of Artificial Sequence: Synthetic oligonucleotide"
  source 1..20: mol_type = other RNA
caggagaatagcttgaacct

SEQ ID NO: 9615 - RNA, 20 nt, synthetic construct
  misc_feature 1..20: note = source = /note="Description of Artificial Sequence: Synthetic oligonucleotide"
  source 1..20: mol_type = other RNA
gagaatagcttgaacctggg

SEQ ID NO: 9616 - RNA, 20 nt, synthetic construct
  misc_feature 1..20: note = source = /note="Description of Artificial Sequence: Synthetic oligonucleotide"
  source 1..20: mol_type = other RNA
aatagcttgaacctgggagg

SEQ ID NO: 9617 - RNA, 20 nt, synthetic construct
  misc_feature 1..20: note = source = /note="Description of Artificial Sequence: Synthetic oligonucleotide"
  source 1..20: mol_type = other RNA
agcttgaacctgggaggtgg

SEQ ID NO: 9618 - RNA, 20 nt, synthetic construct
  misc_feature 1..20: note = source = /note="Description of Artificial Sequence: Synthetic oligonucleotide"
  source 1..20: mol_type = other RNA
aaaccattgcactccagcct

SEQ ID NO: 9619 - RNA, 20 nt, synthetic construct
  misc_feature 1..20: note = source = /note="Description of Artificial Sequence: Synthetic oligonucleotide"
  source 1..20: mol_type = other RNA
aaaaaaaattcatctttaac

SEQ ID NO: 9620 - RNA, 20 nt, synthetic construct
  misc_feature 1..20: note = source = /note="Description of Artificial Sequence: Synthetic oligonucleotide"
  source 1..20: mol_type = other RNA
aaaaaaattcatctttaact

SEQ ID NO: 9621 - RNA, 20 nt, synthetic construct
  misc_feature 1..20: note = source = /note="Description of Artificial Sequence: Synthetic oligonucleotide"
  source 1..20: mol_type = other RNA
aattcatctttaactgggtg

SEQ ID NO: 9622 - RNA, 20 nt, synthetic construct
  misc_feature 1..20: note = source = /note="Description of Artificial Sequence: Synthetic oligonucleotide"
  source 1..20: mol_type = other RNA
gcctgtaatcccagctaccc

SEQ ID NO: 9623 - RNA, 20 nt, synthetic construct
  misc_feature 1..20: note = source = /note="Description of Artificial Sequence: Synthetic oligonucleotide"
  source 1..20: mol_type = other RNA
tcccagctacccaggagacc

SEQ ID NO: 9624 - RNA, 20 nt, synthetic construct
  misc_feature 1..20: note = source = /note="Description of Artificial Sequence: Synthetic oligonucleotide"
  source 1..20: mol_type = other RNA
cccaggagaccaggagtctg

SEQ ID NO: 9625 - RNA, 20 nt, synthetic construct
  misc_feature 1..20: note = source = /note="Description of Artificial Sequence: Synthetic oligonucleotide"
  source 1..20: mol_type = other RNA
agaccaggagtctgaggctg

SEQ ID NO: 9626 - RNA, 20 nt, synthetic construct
  misc_feature 1..20: note = source = /note="Description of Artificial Sequence: Synthetic oligonucleotide"
  source 1..20: mol_type = other RNA
tgcatcactgtgctccatcc

SEQ ID NO: 9627 - RNA, 20 nt, synthetic construct
  misc_feature 1..20: note = source = /note="Description of Artificial Sequence: Synthetic oligonucleotide"
  source 1..20: mol_type = other RNA
gcatcactgtgctccatcct

SEQ ID NO: 9628 - RNA, 20 nt, synthetic construct
  misc_feature 1..20: note = source = /note="Description of Artificial Sequence: Synthetic oligonucleotide"
  source 1..20: mol_type = other RNA
caaaagaattccttctttag

SEQ ID NO: 9629 - RNA, 20 nt, synthetic construct
  misc_feature 1..20: note = source = /note="Description of Artificial Sequence: Synthetic oligonucleotide"
  source 1..20: mol_type = other RNA
tagaattacacagttccagc

SEQ ID NO: 9630 - RNA, 20 nt, synthetic construct
  misc_feature 1..20: note = source = /note="Description of Artificial Sequence: Synthetic oligonucleotide"
  source 1..20: mol_type = other RNA
atctttgaactttattctgt

SEQ ID NO: 9631 - RNA, 20 nt, synthetic construct
  misc_feature 1..20: note = source = /note="Description of Artificial Sequence: Synthetic oligonucleotide"
  source 1..20: mol_type = other RNA
tttattctgtaggtaaccat

SEQ ID NO: 9632 - RNA, 20 nt, synthetic construct
  misc_feature 1..20: note = source = /note="Description of Artificial Sequence: Synthetic oligonucleotide"
  source 1..20: mol_type = other RNA
ttattctgtaggtaaccatt

SEQ ID NO: 9633 - RNA, 20 nt, synthetic construct
  misc_feature 1..20: note = source = /note="Description of Artificial Sequence: Synthetic oligonucleotide"
  source 1..20: mol_type = other RNA
gggctgtttcaagtgtgtgt

SEQ ID NO: 9634 - RNA, 20 nt, synthetic construct
  misc_feature 1..20: note = source = /note="Description of Artificial Sequence: Synthetic oligonucleotide"
  source 1..20: mol_type = other RNA
ggctgtttcaagtgtgtgtt

SEQ ID NO: 9635 - RNA, 20 nt, synthetic construct
  misc_feature 1..20: note = source = /note="Description of Artificial Sequence: Synthetic oligonucleotide"
  source 1..20: mol_type = other RNA
gctgtttcaagtgtgtgttg

SEQ ID NO: 9636 - RNA, 20 nt, synthetic construct
  misc_feature 1..20: note = source = /note="Description of Artificial Sequence: Synthetic oligonucleotide"
  source 1..20: mol_type = other RNA
tttcaagtgtgtgttgggga

SEQ ID NO: 9637 - RNA, 20 nt, synthetic construct
  misc_feature 1..20: note = source = /note="Description of Artificial Sequence: Synthetic oligonucleotide"
  source 1..20: mol_type = other RNA
aagtgtgtgttggggatgga

SEQ ID NO: 9638 - RNA, 20 nt, synthetic construct
  misc_feature 1..20: note = source = /note="Description of Artificial Sequence: Synthetic oligonucleotide"
  source 1..20: mol_type = other RNA
agtgtgtgttggggatggaa

SEQ ID NO: 9639 - RNA, 20 nt, synthetic construct
  misc_feature 1..20: note = source = /note="Description of Artificial Sequence: Synthetic oligonucleotide"
  source 1..20: mol_type = other RNA
atttacttaaaagccaagta

SEQ ID NO: 9640 - RNA, 20 nt, synthetic construct
  misc_feature 1..20: note = source = /note="Description of Artificial Sequence: Synthetic oligonucleotide"
  source 1..20: mol_type = other RNA
tttacttaaaagccaagtaa

SEQ ID NO: 9641 - RNA, 20 nt, synthetic construct
  misc_feature 1..20: note = source = /note="Description of Artificial Sequence: Synthetic oligonucleotide"
  source 1..20: mol_type = other RNA
aagaaagctattgcaatcat

SEQ ID NO: 9642 - RNA, 20 nt, synthetic construct
  misc_feature 1..20: note = source = /note="Description of Artificial Sequence: Synthetic oligonucleotide"
  source 1..20: mol_type = other RNA
agaaagctattgcaatcatt

SEQ ID NO: 9643 - RNA, 20 nt, synthetic construct
  misc_feature 1..20: note = source = /note="Description of Artificial Sequence: Synthetic oligonucleotide"
  source 1..20: mol_type = other RNA
tcattgggcaagagatttta

SEQ ID NO: 9644 - RNA, 20 nt, synthetic construct
  misc_feature 1..20: note = source = /note="Description of Artificial Sequence: Synthetic oligonucleotide"
  source 1..20: mol_type = other RNA
attttaaggacctaaagaaa

SEQ ID NO: 9645 - RNA, 20 nt, synthetic construct
  misc_feature 1..20: note = source = /note="Description of Artificial Sequence: Synthetic oligonucleotide"
  source 1..20: mol_type = other RNA
taaggacctaaagaaatggc

SEQ ID NO: 9646 - RNA, 20 nt, synthetic construct
  misc_feature 1..20: note = source = /note="Description of Artificial Sequence: Synthetic oligonucleotide"
  source 1..20: mol_type = other RNA
ttaagtatgtacactaacta

SEQ ID NO: 9647 - RNA, 20 nt, synthetic construct
  misc_feature 1..20: note = source = /note="Description of Artificial Sequence: Synthetic oligonucleotide"
  source 1..20: mol_type = other RNA
agtatgtacactaactaagg

SEQ ID NO: 9648 - RNA, 20 nt, synthetic construct
  misc_feature 1..20: note = source = /note="Description of Artificial Sequence: Synthetic oligonucleotide"
  source 1..20: mol_type = other RNA
aaggtggagcttagagaact

SEQ ID NO: 9649 - RNA, 20 nt, synthetic construct
  misc_feature 1..20: note = source = /note="Description of Artificial Sequence: Synthetic oligonucleotide"
  source 1..20: mol_type = other RNA
gaacttggtgactagatgta

SEQ ID NO: 9650 - RNA, 20 nt, synthetic construct
  misc_feature 1..20: note = source = /note="Description of Artificial Sequence: Synthetic oligonucleotide"
  source 1..20: mol_type = other RNA
gtatggatgagaaaagaatt

SEQ ID NO: 9651 - RNA, 20 nt, synthetic construct
  misc_feature 1..20: note = source = /note="Description of Artificial Sequence: Synthetic oligonucleotide"
  source 1..20: mol_type = other RNA
gatacaacaaatttccagtt

SEQ ID NO: 9652 - RNA, 20 nt, synthetic construct
  misc_feature 1..20: note = source = /note="Description of Artificial Sequence: Synthetic oligonucleotide"
  source 1..20: mol_type = other RNA
aacaaatttccagtttggac

SEQ ID NO: 9653 - RNA, 20 nt, synthetic construct
  misc_feature 1..20: note = source = /note="Description of Artificial Sequence: Synthetic oligonucleotide"
  source 1..20: mol_type = other RNA
tattaactagtatcagaaat

SEQ ID NO: 9654 - RNA, 20 nt, synthetic construct
  misc_feature 1..20: note = source = /note="Description of Artificial Sequence: Synthetic oligonucleotide"
  source 1..20: mol_type = other RNA
tggtaagaaatagtaagttt

SEQ ID NO: 9655 - RNA, 20 nt, synthetic construct
  misc_feature 1..20: note = source = /note="Description of Artificial Sequence: Synthetic oligonucleotide"
  source 1..20: mol_type = other RNA
ggtaagaaatagtaagtttt

SEQ ID NO: 9656 - RNA, 20 nt, synthetic construct
  misc_feature 1..20: note = source = /note="Description of Artificial Sequence: Synthetic oligonucleotide"
  source 1..20: mol_type = other RNA
agaaatagtaagttttggga

SEQ ID NO: 9657 - RNA, 20 nt, synthetic construct
  misc_feature 1..20: note = source = /note="Description of Artificial Sequence: Synthetic oligonucleotide"
  source 1..20: mol_type = other RNA
gaaatagtaagttttgggat

SEQ ID NO: 9658 - RNA, 20 nt, synthetic construct
  misc_feature 1..20: note = source = /note="Description of Artificial Sequence: Synthetic oligonucleotide"
  source 1..20: mol_type = other RNA
aaatagtaagttttgggatg

SEQ ID NO: 9659 - RNA, 20 nt, synthetic construct
  misc_feature 1..20: note = source = /note="Description of Artificial Sequence: Synthetic oligonucleotide"
  source 1..20: mol_type = other RNA
gggagaagatatcaaaattt

SEQ ID NO: 9660 - RNA, 20 nt, synthetic construct
  misc_feature 1..20: note = source = /note="Description of Artificial Sequence: Synthetic oligonucleotide"
  source 1..20: mol_type = other RNA
atcaaaattttggacatgct

SEQ ID NO: 9661 - RNA, 20 nt, synthetic construct
  misc_feature 1..20: note = source = /note="Description of Artificial Sequence: Synthetic oligonucleotide"
  source 1..20: mol_type = other RNA
tttggacatgctaggcttct

SEQ ID NO: 9662 - RNA, 20 nt, synthetic construct
  misc_feature 1..20: note = source = /note="Description of Artificial Sequence: Synthetic oligonucleotide"
  source 1..20: mol_type = other RNA
aggcttctaggttaattaga

SEQ ID NO: 9663 - RNA, 20 nt, synthetic construct
  misc_feature 1..20: note = source = /note="Description of Artificial Sequence: Synthetic oligonucleotide"
  source 1..20: mol_type = other RNA
ggttaattagatggagaatc

SEQ ID NO: 9664 - RNA, 20 nt, synthetic construct
  misc_feature 1..20: note = source = /note="Description of Artificial Sequence: Synthetic oligonucleotide"
  source 1..20: mol_type = other RNA
gagaatcaggagaaaaattc

SEQ ID NO: 9665 - RNA, 20 nt, synthetic construct
  misc_feature 1..20: note = source = /note="Description of Artificial Sequence: Synthetic oligonucleotide"
  source 1..20: mol_type = other RNA
agatttgagagtcagaatgc

SEQ ID NO: 9666 - RNA, 20 nt, synthetic construct
  misc_feature 1..20: note = source = /note="Description of Artificial Sequence: Synthetic oligonucleotide"
  source 1..20: mol_type = other RNA
ttgagagtcagaatgctggc

SEQ ID NO: 9667 - RNA, 20 nt, synthetic construct
  misc_feature 1..20: note = source = /note="Description of Artificial Sequence: Synthetic oligonucleotide"
  source 1..20: mol_type = other RNA
ggacttaaagttgaatacat

SEQ ID NO: 9668 - RNA, 20 nt, synthetic construct
  misc_feature 1..20: note = source = /note="Description of Artificial Sequence: Synthetic oligonucleotide"
  source 1..20: mol_type = other RNA
gttgaatacataggaatgaa

SEQ ID NO: 9669 - RNA, 20 nt, synthetic construct
  misc_feature 1..20: note = source = /note="Description of Artificial Sequence: Synthetic oligonucleotide"
  source 1..20: mol_type = other RNA
gaatacataggaatgaaagg

SEQ ID NO: 9670 - RNA, 20 nt, synthetic construct
  misc_feature 1..20: note = source = /note="Description of Artificial Sequence: Synthetic oligonucleotide"
  source 1..20: mol_type = other RNA
tcaaagtagagattataaag

SEQ ID NO: 9671 - RNA, 20 nt, synthetic construct
  misc_feature 1..20: note = source = /note="Description of Artificial Sequence: Synthetic oligonucleotide"
  source 1..20: mol_type = other RNA
agagattataaagaggacaa

SEQ ID NO: 9672 - RNA, 20 nt, synthetic construct
  misc_feature 1..20: note = source = /note="Description of Artificial Sequence: Synthetic oligonucleotide"
  source 1..20: mol_type = other RNA
gagattataaagaggacaaa

SEQ ID NO: 9673 - RNA, 20 nt, synthetic construct
  misc_feature 1..20: note = source = /note="Description of Artificial Sequence: Synthetic oligonucleotide"
  source 1..20: mol_type = other RNA
agaggacaaagggctgatga

SEQ ID NO: 9674 - RNA, 20 nt, synthetic construct
  misc_feature 1..20: note = source = /note="Description of Artificial Sequence: Synthetic oligonucleotide"
  source 1..20: mol_type = other RNA
gaggacaaagggctgatgat

SEQ ID NO: 9675 - RNA, 20 nt, synthetic construct
  misc_feature 1..20: note = source = /note="Description of Artificial Sequence: Synthetic oligonucleotide"
  source 1..20: mol_type = other RNA
aagggctgatgatgggattc

SEQ ID NO: 9676 - RNA, 20 nt, synthetic construct
  misc_feature 1..20: note = source = /note="Description of Artificial Sequence: Synthetic oligonucleotide"
  source 1..20: mol_type = other RNA
ctggagccatcaatcatttt

SEQ ID NO: 9677 - RNA, 20 nt, synthetic construct
  misc_feature 1..20: note = source = /note="Description of Artificial Sequence: Synthetic oligonucleotide"
  source 1..20: mol_type = other RNA
tcaatcattttaggcatgag

SEQ ID NO: 9678 - RNA, 20 nt, synthetic construct
  misc_feature 1..20: note = source = /note="Description of Artificial Sequence: Synthetic oligonucleotide"
  source 1..20: mol_type = other RNA
atcattttaggcatgagtgg

SEQ ID NO: 9679 - RNA, 20 nt, synthetic construct
  misc_feature 1..20: note = source = /note="Description of Artificial Sequence: Synthetic oligonucleotide"
  source 1..20: mol_type = other RNA
gaagccaatgaagtaagaac

SEQ ID NO: 9680 - RNA, 20 nt, synthetic construct
  misc_feature 1..20: note = source = /note="Description of Artificial Sequence: Synthetic oligonucleotide"
  source 1..20: mol_type = other RNA
aagccaatgaagtaagaact

SEQ ID NO: 9681 - RNA, 20 nt, synthetic construct
  misc_feature 1..20: note = source = /note="Description of Artificial Sequence: Synthetic oligonucleotide"
  source 1..20: mol_type = other RNA
agccaatgaagtaagaactg

SEQ ID NO: 9682 - RNA, 20 nt, synthetic construct
  misc_feature 1..20: note = source = /note="Description of Artificial Sequence: Synthetic oligonucleotide"
  source 1..20: mol_type = other RNA
gccaatgaagtaagaactgg

SEQ ID NO: 9683 - RNA, 20 nt, synthetic construct
  misc_feature 1..20: note = source = /note="Description of Artificial Sequence: Synthetic oligonucleotide"
  source 1..20: mol_type = other RNA
aatgaagtaagaactggggg

SEQ ID NO: 9684 - RNA, 20 nt, synthetic construct
  misc_feature 1..20: note = source = /note="Description of Artificial Sequence: Synthetic oligonucleotide"
  source 1..20: mol_type = other RNA
atgaagtaagaactggggga

SEQ ID NO: 9685 - RNA, 20 nt, synthetic construct
  misc_feature 1..20: note = source = /note="Description of Artificial Sequence: Synthetic oligonucleotide"
  source 1..20: mol_type = other RNA
gggagtagaagaaatgtagt

SEQ ID NO: 9686 - RNA, 20 nt, synthetic construct
  misc_feature 1..20: note = source = /note="Description of Artificial Sequence: Synthetic oligonucleotide"
  source 1..20: mol_type = other RNA
tgtagtaggaaaagtgaaag

SEQ ID NO: 9687 - RNA, 20 nt, synthetic construct
  misc_feature 1..20: note = source = /note="Description of Artificial Sequence: Synthetic oligonucleotide"
  source 1..20: mol_type = other RNA
gtagtaggaaaagtgaaaga

SEQ ID NO: 9688 - RNA, 20 nt, synthetic construct
  misc_feature 1..20: note = source = /note="Description of Artificial Sequence: Synthetic oligonucleotide"
  source 1..20: mol_type = other RNA
ggaaaagtgaaagagggaga

SEQ ID NO: 9689 - RNA, 20 nt, synthetic construct
  misc_feature 1..20: note = source = /note="Description of Artificial Sequence: Synthetic oligonucleotide"
  source 1..20: mol_type = other RNA
aagtgaaagagggagatgga

SEQ ID NO: 9690 - RNA, 20 nt, synthetic construct
  misc_feature 1..20: note = source = /note="Description of Artificial Sequence: Synthetic oligonucleotide"
  source 1..20: mol_type = other RNA
gaaagagggagatggatgga

SEQ ID NO: 9691 - RNA, 20 nt, synthetic construct
  misc_feature 1..20: note = source = /note="Description of Artificial Sequence: Synthetic oligonucleotide"
  source 1..20: mol_type = other RNA
agagggagatggatggatgg

SEQ ID NO: 9692 - RNA, 20 nt, synthetic construct
  misc_feature 1..20: note = source = /note="Description of Artificial Sequence: Synthetic oligonucleotide"
  source 1..20: mol_type = other RNA
atggatggatggaggaaagc

SEQ ID NO: 9693 - RNA, 20 nt, synthetic construct
  misc_feature 1..20: note = source = /note="Description of Artificial Sequence: Synthetic oligonucleotide"
  source 1..20: mol_type = other RNA
acacccagagcagagtatac

SEQ ID NO: 9694 - RNA, 20 nt, synthetic construct
  misc_feature 1..20: note = source = /note="Description of Artificial Sequence: Synthetic oligonucleotide"
  source 1..20: mol_type = other RNA
gcagagtatacaggagcaat

SEQ ID NO: 9695 - RNA, 20 nt, synthetic construct
  misc_feature 1..20: note = source = /note="Description of Artificial Sequence: Synthetic oligonucleotide"
  source 1..20: mol_type = other RNA
gtatacaggagcaataggta

SEQ ID NO: 9696 - RNA, 20 nt, synthetic construct
  misc_feature 1..20: note = source = /note="Description of Artificial Sequence: Synthetic oligonucleotide"
  source 1..20: mol_type = other RNA
tatacaggagcaataggtat

SEQ ID NO: 9697 - RNA, 20 nt, synthetic construct
  misc_feature 1..20: note = source = /note="Description of Artificial Sequence: Synthetic oligonucleotide"
  source 1..20: mol_type = other RNA
atacaggagcaataggtatg

SEQ ID NO: 9698 - RNA, 20 nt, synthetic construct
  misc_feature 1..20: note = source = /note="Description of Artificial Sequence: Synthetic oligonucleotide"
  source 1..20: mol_type = other RNA
gagcaataggtatggggctc

SEQ ID NO: 9699 - RNA, 20 nt, synthetic construct
  misc_feature 1..20: note = source = /note="Description of Artificial Sequence: Synthetic oligonucleotide"
  source 1..20: mol_type = other RNA
agcaataggtatggggctct

SEQ ID NO: 9700 - RNA, 20 nt, synthetic construct
  misc_feature 1..20: note = source = /note="Description of Artificial Sequence: Synthetic oligonucleotide"
  source 1..20: mol_type = other RNA
ataggtatggggctctggga

SEQ ID NO: 9701 - RNA, 20 nt, synthetic construct
  misc_feature 1..20: note = source = /note="Description of Artificial Sequence: Synthetic oligonucleotide"
  source 1..20: mol_type = other RNA
taggtatggggctctgggat

SEQ ID NO: 9702 - RNA, 20 nt, synthetic construct
  misc_feature 1..20: note = source = /note="Description of Artificial Sequence: Synthetic oligonucleotide"
  source 1..20: mol_type = other RNA
gataatattaaagactctcg

SEQ ID NO: 9703 - RNA, 20 nt, synthetic construct
  misc_feature 1..20: note = source = /note="Description of Artificial Sequence: Synthetic oligonucleotide"
  source 1..20: mol_type = other RNA
ataatattaaagactctcgt

SEQ ID NO: 9704 - RNA, 20 nt, synthetic construct
  misc_feature 1..20: note = source = /note="Description of Artificial Sequence: Synthetic oligonucleotide"
  source 1..20: mol_type = other RNA
attagtttacacagcagaca

SEQ ID NO: 9705 - RNA, 20 nt, synthetic construct
  misc_feature 1..20: note = source = /note="Description of Artificial Sequence: Synthetic oligonucleotide"
  source 1..20: mol_type = other RNA
ttacacagcagacatggaca

SEQ ID NO: 9706 - RNA, 20 nt, synthetic construct
  misc_feature 1..20: note = source = /note="Description of Artificial Sequence: Synthetic oligonucleotide"
  source 1..20: mol_type = other RNA
tacacagcagacatggacaa

SEQ ID NO: 9707 - RNA, 20 nt, synthetic construct
  misc_feature 1..20: note = source = /note="Description of Artificial Sequence: Synthetic oligonucleotide"
  source 1..20: mol_type = other RNA
gctactcttcttttccactg

SEQ ID NO: 9708 - RNA, 20 nt, synthetic construct
  misc_feature 1..20: note = source = /note="Description of Artificial Sequence: Synthetic oligonucleotide"
  source 1..20: mol_type = other RNA
caaacatttttttttttttt

SEQ ID NO: 9709 - RNA, 20 nt, synthetic construct
  misc_feature 1..20: note = source = /note="Description of Artificial Sequence: Synthetic oligonucleotide"
  source 1..20: mol_type = other RNA
ttttttggttcgaacaatag

SEQ ID NO: 9710 - RNA, 20 nt, synthetic construct
  misc_feature 1..20: note = source = /note="Description of Artificial Sequence: Synthetic oligonucleotide"
  source 1..20: mol_type = other RNA
aatagaggcaaattaaacga

SEQ ID NO: 9711 - RNA, 20 nt, synthetic construct
  misc_feature 1..20: note = source = /note="Description of Artificial Sequence: Synthetic oligonucleotide"
  source 1..20: mol_type = other RNA
ttttaaacactattaatagt

SEQ ID NO: 9712 - RNA, 20 nt, synthetic construct
  misc_feature 1..20: note = source = /note="Description of Artificial Sequence: Synthetic oligonucleotide"
  source 1..20: mol_type = other RNA
agctagtatcacaaagtata

SEQ ID NO: 9713 - RNA, 20 nt, synthetic construct
  misc_feature 1..20: note = source = /note="Description of Artificial Sequence: Synthetic oligonucleotide"
  source 1..20: mol_type = other RNA
tatgttgctagatttaaagt

SEQ ID NO: 9714 - RNA, 20 nt, synthetic construct
  misc_feature 1..20: note = source = /note="Description of Artificial Sequence: Synthetic oligonucleotide"
  source 1..20: mol_type = other RNA
atgttgctagatttaaagtt

SEQ ID NO: 9715 - RNA, 20 nt, synthetic construct
  misc_feature 1..20: note = source = /note="Description of Artificial Sequence: Synthetic oligonucleotide"
  source 1..20: mol_type = other RNA
ctattaaatgaatttttaat

SEQ ID NO: 9716 - RNA, 20 nt, synthetic construct
  misc_feature 1..20: note = source = /note="Description of Artificial Sequence: Synthetic oligonucleotide"
  source 1..20: mol_type = other RNA
aataggtgctgttaatcaaa

SEQ ID NO: 9717 - RNA, 20 nt, synthetic construct
  misc_feature 1..20: note = source = /note="Description of Artificial Sequence: Synthetic oligonucleotide"
  source 1..20: mol_type = other RNA
taatcaaatggctttacttg

SEQ ID NO: 9718 - RNA, 20 nt, synthetic construct
  misc_feature 1..20: note = source = /note="Description of Artificial Sequence: Synthetic oligonucleotide"
  source 1..20: mol_type = other RNA
tgctcccttgattcttatta

SEQ ID NO: 9719 - RNA, 20 nt, synthetic construct
  misc_feature 1..20: note = source = /note="Description of Artificial Sequence: Synthetic oligonucleotide"
  source 1..20: mol_type = other RNA
agtcaattaatagttgtaaa

SEQ ID NO: 9720 - RNA, 20 nt, synthetic construct
  misc_feature 1..20: note = source = /note="Description of Artificial Sequence: Synthetic oligonucleotide"
  source 1..20: mol_type = other RNA
atggatgagatgcttctgaa

SEQ ID NO: 9721 - RNA, 20 nt, synthetic construct
  misc_feature 1..20: note = source = /note="Description of Artificial Sequence: Synthetic oligonucleotide"
  source 1..20: mol_type = other RNA
taaaatatttttatattgca

SEQ ID NO: 9722 - RNA, 20 nt, synthetic construct
  misc_feature 1..20: note = source = /note="Description of Artificial Sequence: Synthetic oligonucleotide"
  source 1..20: mol_type = other RNA
atatttttatattgcatggt

SEQ ID NO: 9723 - RNA, 20 nt, synthetic construct
  misc_feature 1..20: note = source = /note="Description of Artificial Sequence: Synthetic oligonucleotide"
  source 1..20: mol_type = other RNA
tattgcatggtaggtactat

SEQ ID NO: 9724 - RNA, 20 nt, synthetic construct
  misc_feature 1..20: note = source = /note="Description of Artificial Sequence: Synthetic oligonucleotide"
  source 1..20: mol_type = other RNA
tgatgtttccacacagtaca

SEQ ID NO: 9725 - RNA, 20 nt, synthetic construct
  misc_feature 1..20: note = source = /note="Description of Artificial Sequence: Synthetic oligonucleotide"
  source 1..20: mol_type = other RNA
gatgtttccacacagtacac

SEQ ID NO: 9726 - RNA, 20 nt, synthetic construct
  misc_feature 1..20: note = source = /note="Description of Artificial Sequence: Synthetic oligonucleotide"
  source 1..20: mol_type = other RNA
tcttattgctaaagtttagt

SEQ ID NO: 9727 - RNA, 20 nt, synthetic construct
  misc_feature 1..20: note = source = /note="Description of Artificial Sequence: Synthetic oligonucleotide"
  source 1..20: mol_type = other RNA
catctcttctgtcagtccca

SEQ ID NO: 9728 - RNA, 20 nt, synthetic construct
  misc_feature 1..20: note = source = /note="Description of Artificial Sequence: Synthetic oligonucleotide"
  source 1..20: mol_type = other RNA
ctatccagtagacatatatt

SEQ ID NO: 9729 - RNA, 20 nt, synthetic construct
  misc_feature 1..20: note = source = /note="Description of Artificial Sequence: Synthetic oligonucleotide"
  source 1..20: mol_type = other RNA
aacagtagacctgaaatagc

SEQ ID NO: 9730 - RNA, 20 nt, synthetic construct
  misc_feature 1..20: note = source = /note="Description of Artificial Sequence: Synthetic oligonucleotide"
  source 1..20: mol_type = other RNA
aagagagctttctatgaaga

SEQ ID NO: 9731 - RNA, 20 nt, synthetic construct
  misc_feature 1..20: note = source = /note="Description of Artificial Sequence: Synthetic oligonucleotide"
  source 1..20: mol_type = other RNA
tttatgctgttcagtgtaat

SEQ ID NO: 9732 - RNA, 20 nt, synthetic construct
  misc_feature 1..20: note = source = /note="Description of Artificial Sequence: Synthetic oligonucleotide"
  source 1..20: mol_type = other RNA
taataggcactagccacatg

SEQ ID NO: 9733 - RNA, 20 nt, synthetic construct
  misc_feature 1..20: note = source = /note="Description of Artificial Sequence: Synthetic oligonucleotide"
  source 1..20: mol_type = other RNA
attatttaacagttgatacg

SEQ ID NO: 9734 - RNA, 20 nt, synthetic construct
  misc_feature 1..20: note = source = /note="Description of Artificial Sequence: Synthetic oligonucleotide"
  source 1..20: mol_type = other RNA
ttaacacaaacagccacatg

SEQ ID NO: 9735 - RNA, 20 nt, synthetic construct
  misc_feature 1..20: note = source = /note="Description of Artificial Sequence: Synthetic oligonucleotide"
  source 1..20: mol_type = other RNA
aaacagccacatgtggataa

SEQ ID NO: 9736 - RNA, 20 nt, synthetic construct
  misc_feature 1..20: note = source = /note="Description of Artificial Sequence: Synthetic oligonucleotide"
  source 1..20: mol_type = other RNA
ttgtcttccagacatttaga

SEQ ID NO: 9737 - RNA, 20 nt, synthetic construct
  misc_feature 1..20: note = source = /note="Description of Artificial Sequence: Synthetic oligonucleotide"
  source 1..20: mol_type = other RNA
ttcattcacaaaatcctgca

SEQ ID NO: 9738 - RNA, 20 nt, synthetic construct
  misc_feature 1..20: note = source = /note="Description of Artificial Sequence: Synthetic oligonucleotide"
  source 1..20: mol_type = other RNA
aatcctgcatggtatttttt

SEQ ID NO: 9739 - RNA, 20 nt, synthetic construct
  misc_feature 1..20: note = source = /note="Description of Artificial Sequence: Synthetic oligonucleotide"
  source 1..20: mol_type = other RNA
gcatggtattttttaggaga

SEQ ID NO: 9740 - RNA, 20 nt, synthetic construct
  misc_feature 1..20: note = source = /note="Description of Artificial Sequence: Synthetic oligonucleotide"
  source 1..20: mol_type = other RNA
agaccacagcatgaactgaa

SEQ ID NO: 9741 - RNA, 20 nt, synthetic construct
  misc_feature 1..20: note = source = /note="Description of Artificial Sequence: Synthetic oligonucleotide"
  source 1..20: mol_type = other RNA
catctatgttaaagagtagt

SEQ ID NO: 9742 - RNA, 20 nt, synthetic construct
  misc_feature 1..20: note = source = /note="Description of Artificial Sequence: Synthetic oligonucleotide"
  source 1..20: mol_type = other RNA
ttggtaccttcattttcctt

SEQ ID NO: 9743 - RNA, 20 nt, synthetic construct
  misc_feature 1..20: note = source = /note="Description of Artificial Sequence: Synthetic oligonucleotide"
  source 1..20: mol_type = other RNA
cctttggccaaagttttatg

SEQ ID NO: 9744 - RNA, 20 nt, synthetic construct
  misc_feature 1..20: note = source = /note="Description of Artificial Sequence: Synthetic oligonucleotide"
  source 1..20: mol_type = other RNA
agttcatcttctagccatga

SEQ ID NO: 9745 - RNA, 20 nt, synthetic construct
  misc_feature 1..20: note = source = /note="Description of Artificial Sequence: Synthetic oligonucleotide"
  source 1..20: mol_type = other RNA
tgacaaaatatatgaaacaa

SEQ ID NO: 9746 - RNA, 20 nt, synthetic construct
  misc_feature 1..20: note = source = /note="Description of Artificial Sequence: Synthetic oligonucleotide"
  source 1..20: mol_type = other RNA
ataagaaattcaagagacag

SEQ ID NO: 9747 - RNA, 20 nt, synthetic construct
  misc_feature 1..20: note = source = /note="Description of Artificial Sequence: Synthetic oligonucleotide"
  source 1..20: mol_type = other RNA
gacagtggcaccagagagaa

SEQ ID NO: 9748 - RNA, 20 nt, synthetic construct
  misc_feature 1..20: note = source = /note="Description of Artificial Sequence: Synthetic oligonucleotide"
  source 1..20: mol_type = other RNA
cagagagaaaggaagtaaaa

SEQ ID NO: 9749 - RNA, 20 nt, synthetic construct
  misc_feature 1..20: note = source = /note="Description of Artificial Sequence: Synthetic oligonucleotide"
  source 1..20: mol_type = other RNA
tacttcctgaagagagtatt

SEQ ID NO: 9750 - RNA, 20 nt, synthetic construct
  misc_feature 1..20: note = source = /note="Description of Artificial Sequence: Synthetic oligonucleotide"
  source 1..20: mol_type = other RNA
taggctccagtgtagccagt

SEQ ID NO: 9751 - RNA, 20 nt, synthetic construct
  misc_feature 1..20: note = source = /note="Description of Artificial Sequence: Synthetic oligonucleotide"
  source 1..20: mol_type = other RNA
ccagccttatctctgtatta

SEQ ID NO: 9752 - RNA, 20 nt, synthetic construct
  misc_feature 1..20: note = source = /note="Description of Artificial Sequence: Synthetic oligonucleotide"
  source 1..20: mol_type = other RNA
aggagacaaagttcaaaatt

SEQ ID NO: 9753 - RNA, 20 nt, synthetic construct
  misc_feature 1..20: note = source = /note="Description of Artificial Sequence: Synthetic oligonucleotide"
  source 1..20: mol_type = other RNA
acaaagttcaaaatttggag

SEQ ID NO: 9754 - RNA, 20 nt, synthetic construct
  misc_feature 1..20: note = source = /note="Description of Artificial Sequence: Synthetic oligonucleotide"
  source 1..20: mol_type = other RNA
ttcaaaatttggagaggcca

SEQ ID NO: 9755 - RNA, 20 nt, synthetic construct
  misc_feature 1..20: note = source = /note="Description of Artificial Sequence: Synthetic oligonucleotide"
  source 1..20: mol_type = other RNA
cactattcagaatatcagag

SEQ ID NO: 9756 - RNA, 20 nt, synthetic construct
  misc_feature 1..20: note = source = /note="Description of Artificial Sequence: Synthetic oligonucleotide"
  source 1..20: mol_type = other RNA
aaagctccagagacctgcag

SEQ ID NO: 9757 - RNA, 20 nt, synthetic construct
  misc_feature 1..20: note = source = /note="Description of Artificial Sequence: Synthetic oligonucleotide"
  source 1..20: mol_type = other RNA
aagctccagagacctgcaga

SEQ ID NO: 9758 - RNA, 20 nt, synthetic construct
  misc_feature 1..20: note = source = /note="Description of Artificial Sequence: Synthetic oligonucleotide"
  source 1..20: mol_type = other RNA
tgcatgtgaaaaaactgcca

SEQ ID NO: 9759 - RNA, 20 nt, synthetic construct
  misc_feature 1..20: note = source = /note="Description of Artificial Sequence: Synthetic oligonucleotide"
  source 1..20: mol_type = other RNA
gtgaaaaaactgccaaggct

SEQ ID NO: 9760 - RNA, 20 nt, synthetic construct
  misc_feature 1..20: note = source = /note="Description of Artificial Sequence: Synthetic oligonucleotide"
  source 1..20: mol_type = other RNA
aaaaactgccaaggctaggt

SEQ ID NO: 9761 - RNA, 20 nt, synthetic construct
  misc_feature 1..20: note = source = /note="Description of Artificial Sequence: Synthetic oligonucleotide"
  source 1..20: mol_type = other RNA
aaaactgccaaggctaggta

SEQ ID NO: 9762 - RNA, 20 nt, synthetic construct
  misc_feature 1..20: note = source = /note="Description of Artificial Sequence: Synthetic oligonucleotide"
  source 1..20: mol_type = other RNA
aaagaaccatcagaagaagc

SEQ ID NO: 9763 - RNA, 20 nt, synthetic construct
  misc_feature 1..20: note = source = /note="Description of Artificial Sequence: Synthetic oligonucleotide"
  source 1..20: mol_type = other RNA
ataatcccttgatctcacac

SEQ ID NO: 9764 - RNA, 20 nt, synthetic construct
  misc_feature 1..20: note = source = /note="Description of Artificial Sequence: Synthetic oligonucleotide"
  source 1..20: mol_type = other RNA
ccttgatctcacacaggacc

SEQ ID NO: 9765 - RNA, 20 nt, synthetic construct
  misc_feature 1..20: note = source = /note="Description of Artificial Sequence: Synthetic oligonucleotide"
  source 1..20: mol_type = other RNA
tcttgatcataccagccaga

SEQ ID NO: 9766 - RNA, 20 nt, synthetic construct
  misc_feature 1..20: note = source = /note="Description of Artificial Sequence: Synthetic oligonucleotide"
  source 1..20: mol_type = other RNA
tattcataattgtattgcct

SEQ ID NO: 9767 - RNA, 20 nt, synthetic construct
  misc_feature 1..20: note = source = /note="Description of Artificial Sequence: Synthetic oligonucleotide"
  source 1..20: mol_type = other RNA
cttggtagtagaagtaaatt

SEQ ID NO: 9768 - RNA, 20 nt, synthetic construct
  misc_feature 1..20: note = source = /note="Description of Artificial Sequence: Synthetic oligonucleotide"
  source 1..20: mol_type = other RNA
gcttaaaatgaaaacataga

SEQ ID NO: 9769 - RNA, 20 nt, synthetic construct
  misc_feature 1..20: note = source = /note="Description of Artificial Sequence: Synthetic oligonucleotide"
  source 1..20: mol_type = other RNA
cttaaaatgaaaacatagaa

SEQ ID NO: 9770 - RNA, 20 nt, synthetic construct
  misc_feature 1..20: note = source = /note="Description of Artificial Sequence: Synthetic oligonucleotide"
  source 1..20: mol_type = other RNA
aaaaaaaaaatctaccaaca

SEQ ID NO: 9771 - RNA, 20 nt, synthetic construct
  misc_feature 1..20: note = source = /note="Description of Artificial Sequence: Synthetic oligonucleotide"
  source 1..20: mol_type = other RNA
gcattccatcagaaaataca

SEQ ID NO: 9772 - RNA, 20 nt, synthetic construct
  misc_feature 1..20: note = source = /note="Description of Artificial Sequence: Synthetic oligonucleotide"
  source 1..20: mol_type = other RNA
aaagaaaatataacctttac

SEQ ID NO: 9773 - RNA, 20 nt, synthetic construct
  misc_feature 1..20: note = source = /note="Description of Artificial Sequence: Synthetic oligonucleotide"
  source 1..20: mol_type = other RNA
aagaaaatataacctttact

SEQ ID NO: 9774 - RNA, 20 nt, synthetic construct
  misc_feature 1..20: note = source = /note="Description of Artificial Sequence: Synthetic oligonucleotide"
  source 1..20: mol_type = other RNA
agaaaatataacctttactg

SEQ ID NO: 9775 - RNA, 20 nt, synthetic construct
  misc_feature 1..20: note = source = /note="Description of Artificial Sequence: Synthetic oligonucleotide"
  source 1..20: mol_type = other RNA
tataacctttactggggaac

SEQ ID NO: 9776 - RNA, 20 nt, synthetic construct
  misc_feature 1..20: note = source = /note="Description of Artificial Sequence: Synthetic oligonucleotide"
  source 1..20: mol_type = other RNA
tgtaaataagttcattaaaa

SEQ ID NO: 9777 - RNA, 20 nt, synthetic construct
  misc_feature 1..20: note = source = /note="Description of Artificial Sequence: Synthetic oligonucleotide"
  source 1..20: mol_type = other RNA
ttcatatgttaaaatgccag

SEQ ID NO: 9778 - RNA, 20 nt, synthetic construct
  misc_feature 1..20: note = source = /note="Description of Artificial Sequence: Synthetic oligonucleotide"
  source 1..20: mol_type = other RNA
aggaaagcatgagagtgata

SEQ ID NO: 9779 - RNA, 20 nt, synthetic construct
  misc_feature 1..20: note = source = /note="Description of Artificial Sequence: Synthetic oligonucleotide"
  source 1..20: mol_type = other RNA
atctagattaaaaatacact

SEQ ID NO: 9780 - RNA, 20 nt, synthetic construct
  misc_feature 1..20: note = source = /note="Description of Artificial Sequence: Synthetic oligonucleotide"
  source 1..20: mol_type = other RNA
tagattaaaaatacactagg

SEQ ID NO: 9781 - RNA, 20 nt, synthetic construct
  misc_feature 1..20: note = source = /note="Description of Artificial Sequence: Synthetic oligonucleotide"
  source 1..20: mol_type = other RNA
taggcggaattaacagatta

SEQ ID NO: 9782 - RNA, 20 nt, synthetic construct
  misc_feature 1..20: note = source = /note="Description of Artificial Sequence: Synthetic oligonucleotide"
  source 1..20: mol_type = other RNA
tacactaatatatgtgtaat

SEQ ID NO: 9783 - RNA, 20 nt, synthetic construct
  misc_feature 1..20: note = source = /note="Description of Artificial Sequence: Synthetic oligonucleotide"
  source 1..20: mol_type = other RNA
tgtgtaattggagtaccaga

SEQ ID NO: 9784 - RNA, 20 nt, synthetic construct
  misc_feature 1..20: note = source = /note="Description of Artificial Sequence: Synthetic oligonucleotide"
  source 1..20: mol_type = other RNA
gtaattggagtaccagaagg

SEQ ID NO: 9785 - RNA, 20 nt, synthetic construct
  misc_feature 1..20: note = source = /note="Description of Artificial Sequence: Synthetic oligonucleotide"
  source 1..20: mol_type = other RNA
attggagtaccagaaggagg

SEQ ID NO: 9786 - RNA, 20 nt, synthetic construct
  misc_feature 1..20: note = source = /note="Description of Artificial Sequence: Synthetic oligonucleotide"
  source 1..20: mol_type = other RNA
ttggagtaccagaaggaggt

SEQ ID NO: 9787 - RNA, 20 nt, synthetic construct
  misc_feature 1..20: note = source = /note="Description of Artificial Sequence: Synthetic oligonucleotide"
  source 1..20: mol_type = other RNA
aaaaatatttaaagaaacaa

SEQ ID NO: 9788 - RNA, 20 nt, synthetic construct
  misc_feature 1..20: note = source = /note="Description of Artificial Sequence: Synthetic oligonucleotide"
  source 1..20: mol_type = other RNA
tgataaagagaaactcagaa

SEQ ID NO: 9789 - RNA, 20 nt, synthetic construct
  misc_feature 1..20: note = source = /note="Description of Artificial Sequence: Synthetic oligonucleotide"
  source 1..20: mol_type = other RNA
gagaaactcagaaaggcaaa

SEQ ID NO: 9790 - RNA, 20 nt, synthetic construct
  misc_feature 1..20: note = source = /note="Description of Artificial Sequence: Synthetic oligonucleotide"
  source 1..20: mol_type = other RNA
gaaaggcaaatggagaaaaa

SEQ ID NO: 9791 - RNA, 20 nt, synthetic construct
  misc_feature 1..20: note = source = /note="Description of Artificial Sequence: Synthetic oligonucleotide"
  source 1..20: mol_type = other RNA
aaaaaaggacatattacact

SEQ ID NO: 9792 - RNA, 20 nt, synthetic construct
  misc_feature 1..20: note = source = /note="Description of Artificial Sequence: Synthetic oligonucleotide"
  source 1..20: mol_type = other RNA
aaaggacatattacactagg

SEQ ID NO: 9793 - RNA, 20 nt, synthetic construct
  misc_feature 1..20: note = source = /note="Description of Artificial Sequence: Synthetic oligonucleotide"
  source 1..20: mol_type = other RNA
aaggacatattacactaggt

SEQ ID NO: 9794 - RNA, 20 nt, synthetic construct
  misc_feature 1..20: note = source = /note="Description of Artificial Sequence: Synthetic oligonucleotide"
  source 1..20: mol_type = other RNA
taggtgggaaaaaataagac

SEQ ID NO: 9795 - RNA, 20 nt, synthetic construct
  misc_feature 1..20: note = source = /note="Description of Artificial Sequence: Synthetic oligonucleotide"
  source 1..20: mol_type = other RNA
aggagacttcattcagaaaa

SEQ ID NO: 9796 - RNA, 20 nt, synthetic construct
  misc_feature 1..20: note = source = /note="Description of Artificial Sequence: Synthetic oligonucleotide"
  source 1..20: mol_type = other RNA
aatgttaaacgaaatccttc

SEQ ID NO: 9797 - RNA, 20 nt, synthetic construct
  misc_feature 1..20: note = source = /note="Description of Artificial Sequence: Synthetic oligonucleotide"
  source 1..20: mol_type = other RNA
agtatcaaaaatagtaaaca

SEQ ID NO: 9798 - RNA, 20 nt, synthetic construct
  misc_feature 1..20: note = source = /note="Description of Artificial Sequence: Synthetic oligonucleotide"
  source 1..20: mol_type = other RNA
tatattaacaatgtattatg

SEQ ID NO: 9799 - RNA, 20 nt, synthetic construct
  misc_feature 1..20: note = source = /note="Description of Artificial Sequence: Synthetic oligonucleotide"
  source 1..20: mol_type = other RNA
aacacgtagaagtagcacag

SEQ ID NO: 9800 - RNA, 20 nt, synthetic construct
  misc_feature 1..20: note = source = /note="Description of Artificial Sequence: Synthetic oligonucleotide"
  source 1..20: mol_type = other RNA
tagaagtagcacagaggctg

SEQ ID NO: 9801 - RNA, 20 nt, synthetic construct
  misc_feature 1..20: note = source = /note="Description of Artificial Sequence: Synthetic oligonucleotide"
  source 1..20: mol_type = other RNA
taaagtacttatacgatatg

SEQ ID NO: 9802 - RNA, 20 nt, synthetic construct
  misc_feature 1..20: note = source = /note="Description of Artificial Sequence: Synthetic oligonucleotide"
  source 1..20: mol_type = other RNA
tacttatacgatatgtggac

SEQ ID NO: 9803 - RNA, 20 nt, synthetic construct
  misc_feature 1..20: note = source = /note="Description of Artificial Sequence: Synthetic oligonucleotide"
  source 1..20: mol_type = other RNA
acttatacgatatgtggact

SEQ ID NO: 9804 - RNA, 20 nt, synthetic construct
  misc_feature 1..20: note = source = /note="Description of Artificial Sequence: Synthetic oligonucleotide"
  source 1..20: mol_type = other RNA
tgtggactgggtatattact

SEQ ID NO: 9805 - RNA, 20 nt, synthetic construct
  misc_feature 1..20: note = source = /note="Description of Artificial Sequence: Synthetic oligonucleotide"
  source 1..20: mol_type = other RNA
aaatgtttttaaaaatatat

SEQ ID NO: 9806 - RNA, 20 nt, synthetic construct
  misc_feature 1..20: note = source = /note="Description of Artificial Sequence: Synthetic oligonucleotide"
  source 1..20: mol_type = other RNA
aaataaaacaaatagcaaga

SEQ ID NO: 9807 - RNA, 20 nt, synthetic construct
  misc_feature 1..20: note = source = /note="Description of Artificial Sequence: Synthetic oligonucleotide"
  source 1..20: mol_type = other RNA
acaaccacattaaatgtaaa

SEQ ID NO: 9808 - RNA, 20 nt, synthetic construct
  misc_feature 1..20: note = source = /note="Description of Artificial Sequence: Synthetic oligonucleotide"
  source 1..20: mol_type = other RNA
ttttaacacccctaattata

SEQ ID NO: 9809 - RNA, 20 nt, synthetic construct
  misc_feature 1..20: note = source = /note="Description of Artificial Sequence: Synthetic oligonucleotide"
  source 1..20: mol_type = other RNA
tgatgttgaaaagacataac

SEQ ID NO: 9810 - RNA, 20 nt, synthetic construct
  misc_feature 1..20: note = source = /note="Description of Artificial Sequence: Synthetic oligonucleotide"
  source 1..20: mol_type = other RNA
aaaaatatgattattgcagt

SEQ ID NO: 9811 - RNA, 20 nt, synthetic construct
  misc_feature 1..20: note = source = /note="Description of Artificial Sequence: Synthetic oligonucleotide"
  source 1..20: mol_type = other RNA
taatattcaacattcataaa

SEQ ID NO: 9812 - RNA, 20 nt, synthetic construct
  misc_feature 1..20: note = source = /note="Description of Artificial Sequence: Synthetic oligonucleotide"
  source 1..20: mol_type = other RNA
caacctattaaatacataaa

SEQ ID NO: 9813 - RNA, 20 nt, synthetic construct
  misc_feature 1..20: note = source = /note="Description of Artificial Sequence: Synthetic oligonucleotide"
  source 1..20: mol_type = other RNA
aaagctaatgctatacttag

SEQ ID NO: 9814 - RNA, 20 nt, synthetic construct
  misc_feature 1..20: note = source = /note="Description of Artificial Sequence: Synthetic oligonucleotide"
  source 1..20: mol_type = other RNA
aatacttgacccctaagata

SEQ ID NO: 9815 - RNA, 20 nt, synthetic construct
  misc_feature 1..20: note = source = /note="Description of Artificial Sequence: Synthetic oligonucleotide"
  source 1..20: mol_type = other RNA
aaattttagaaagtgcagta

SEQ ID NO: 9816 - RNA, 20 nt, synthetic construct
  misc_feature 1..20: note = source = /note="Description of Artificial Sequence: Synthetic oligonucleotide"
  source 1..20: mol_type = other RNA
ataaataaagcagtcaagat

SEQ ID NO: 9817 - RNA, 20 nt, synthetic construct
  misc_feature 1..20: note = source = /note="Description of Artificial Sequence: Synthetic oligonucleotide"
  source 1..20: mol_type = other RNA
taaataaagcagtcaagatt

SEQ ID NO: 9818 - RNA, 20 nt, synthetic construct
  misc_feature 1..20: note = source = /note="Description of Artificial Sequence: Synthetic oligonucleotide"
  source 1..20: mol_type = other RNA
taaagcagtcaagattgggt

SEQ ID NO: 9819 - RNA, 20 nt, synthetic construct
  misc_feature 1..20: note = source = /note="Description of Artificial Sequence: Synthetic oligonucleotide"
  source 1..20: mol_type = other RNA
aaatgtataagattatatac

SEQ ID NO: 9820 - RNA, 20 nt, synthetic construct
  misc_feature 1..20: note = source = /note="Description of Artificial Sequence: Synthetic oligonucleotide"
  source 1..20: mol_type = other RNA
ttatagaaaacttcagtaac

SEQ ID NO: 9821 - RNA, 20 nt, synthetic construct
  misc_feature 1..20: note = source = /note="Description of Artificial Sequence: Synthetic oligonucleotide"
  source 1..20: mol_type = other RNA
ggagagatacactatgttaa

SEQ ID NO: 9822 - RNA, 20 nt, synthetic construct
  misc_feature 1..20: note = source = /note="Description of Artificial Sequence: Synthetic oligonucleotide"
  source 1..20: mol_type = other RNA
tgatgtttcaaaaccccagc

SEQ ID NO: 9823 - RNA, 20 nt, synthetic construct
  misc_feature 1..20: note = source = /note="Description of Artificial Sequence: Synthetic oligonucleotide"
  source 1..20: mol_type = other RNA
agcaggttttttgaaagaat

SEQ ID NO: 9824 - RNA, 20 nt, synthetic construct
  misc_feature 1..20: note = source = /note="Description of Artificial Sequence: Synthetic oligonucleotide"
  source 1..20: mol_type = other RNA
tttgaaagaattggacaaga

SEQ ID NO: 9825 - RNA, 20 nt, synthetic construct
  misc_feature 1..20: note = source = /note="Description of Artificial Sequence: Synthetic oligonucleotide"
  source 1..20: mol_type = other RNA
ggctgtaaaatatatatact

SEQ ID NO: 9826 - RNA, 20 nt, synthetic construct
  misc_feature 1..20: note = source = /note="Description of Artificial Sequence: Synthetic oligonucleotide"
  source 1..20: mol_type = other RNA
atatatacttggaaatgcaa

SEQ ID NO: 9827 - RNA, 20 nt, synthetic construct
  misc_feature 1..20: note = source = /note="Description of Artificial Sequence: Synthetic oligonucleotide"
  source 1..20: mol_type = other RNA
acttggaaatgcaaaggact

SEQ ID NO: 9828 - RNA, 20 nt, synthetic construct
  misc_feature 1..20: note = source = /note="Description of Artificial Sequence: Synthetic oligonucleotide"
  source 1..20: mol_type = other RNA
tcaaataatattttaaaata

SEQ ID NO: 9829 - RNA, 20 nt, synthetic construct
  misc_feature 1..20: note = source = /note="Description of Artificial Sequence: Synthetic oligonucleotide"
  source 1..20: mol_type = other RNA
caaataatattttaaaataa

SEQ ID NO: 9830 - RNA, 20 nt, synthetic construct
  misc_feature 1..20: note = source = /note="Description of Artificial Sequence: Synthetic oligonucleotide"
  source 1..20: mol_type = other RNA
atttgagactatatattgca

SEQ ID NO: 9831 - RNA, 20 nt, synthetic construct
  misc_feature 1..20: note = source = /note="Description of Artificial Sequence: Synthetic oligonucleotide"
  source 1..20: mol_type = other RNA
aagacagtttgatattgccc

SEQ ID NO: 9832 - RNA, 20 nt, synthetic construct
  misc_feature 1..20: note = source = /note="Description of Artificial Sequence: Synthetic oligonucleotide"
  source 1..20: mol_type = other RNA
ttgatattgcccaggcgcag

SEQ ID NO: 9833 - RNA, 20 nt, synthetic construct
  misc_feature 1..20: note = source = /note="Description of Artificial Sequence: Synthetic oligonucleotide"
  source 1..20: mol_type = other RNA
gcctgtaattccagcacttt

SEQ ID NO: 9834 - RNA, 20 nt, synthetic construct
  misc_feature 1..20: note = source = /note="Description of Artificial Sequence: Synthetic oligonucleotide"
  source 1..20: mol_type = other RNA
tgtaattccagcactttcgg

SEQ ID NO: 9835 - RNA, 20 nt, synthetic construct
  misc_feature 1..20: note = source = /note="Description of Artificial Sequence: Synthetic oligonucleotide"
  source 1..20: mol_type = other RNA
tccagcactttcggaggccg

SEQ ID NO: 9836 - RNA, 20 nt, synthetic construct
  misc_feature 1..20: note = source = /note="Description of Artificial Sequence: Synthetic oligonucleotide"
  source 1..20: mol_type = other RNA
agcactttcggaggccgagg

SEQ ID NO: 9837 - RNA, 20 nt, synthetic construct
  misc_feature 1..20: note = source = /note="Description of Artificial Sequence: Synthetic oligonucleotide"
  source 1..20: mol_type = other RNA
gcactttcggaggccgaggt

SEQ ID NO: 9838 - RNA, 20 nt, synthetic construct
  misc_feature 1..20: note = source = /note="Description of Artificial Sequence: Synthetic oligonucleotide"
  source 1..20: mol_type = other RNA
ctttcggaggccgaggtggg

SEQ ID NO: 9839 - RNA, 20 nt, synthetic construct
  misc_feature 1..20: note = source = /note="Description of Artificial Sequence: Synthetic oligonucleotide"
  source 1..20: mol_type = other RNA
cgaggtgggtggatcacttg

SEQ ID NO: 9840 - RNA, 20 nt, synthetic construct
  misc_feature 1..20: note = source = /note="Description of Artificial Sequence: Synthetic oligonucleotide"
  source 1..20: mol_type = other RNA
tgggtggatcacttgaggcc

SEQ ID NO: 9841 - RNA, 20 nt, synthetic construct
  misc_feature 1..20: note = source = /note="Description of Artificial Sequence: Synthetic oligonucleotide"
  source 1..20: mol_type = other RNA
caggagttttgagaccagcc

SEQ ID NO: 9842 - RNA, 20 nt, synthetic construct
  misc_feature 1..20: note = source = /note="Description of Artificial Sequence: Synthetic oligonucleotide"
  source 1..20: mol_type = other RNA
tgagaccagcctggccaaca

SEQ ID NO: 9843 - RNA, 20 nt, synthetic construct
  misc_feature 1..20: note = source = /note="Description of Artificial Sequence: Synthetic oligonucleotide"
  source 1..20: mol_type = other RNA
ataaaaatacaaaaaattac

SEQ ID NO: 9844 - RNA, 20 nt, synthetic construct
  misc_feature 1..20: note = source = /note="Description of Artificial Sequence: Synthetic oligonucleotide"
  source 1..20: mol_type = other RNA
taaaaatacaaaaaattact

SEQ ID NO: 9845 - RNA, 20 nt, synthetic construct
  misc_feature 1..20: note = source = /note="Description of Artificial Sequence: Synthetic oligonucleotide"
  source 1..20: mol_type = other RNA
aaaaatacaaaaaattactg

SEQ ID NO: 9846 - RNA, 20 nt, synthetic construct
  misc_feature 1..20: note = source = /note="Description of Artificial Sequence: Synthetic oligonucleotide"
  source 1..20: mol_type = other RNA
tacaaaaaattactggggca

SEQ ID NO: 9847 - RNA, 20 nt, synthetic construct
  misc_feature 1..20: note = source = /note="Description of Artificial Sequence: Synthetic oligonucleotide"
  source 1..20: mol_type = other RNA
aaaaaattactggggcatgg

SEQ ID NO: 9848 - RNA, 20 nt, synthetic construct
  misc_feature 1..20: note = source = /note="Description of Artificial Sequence: Synthetic oligonucleotide"
  source 1..20: mol_type = other RNA
tgcttatagtcccagctgct

SEQ ID NO: 9849 - RNA, 20 nt, synthetic construct
  misc_feature 1..20: note = source = /note="Description of Artificial Sequence: Synthetic oligonucleotide"
  source 1..20: mol_type = other RNA
gcttatagtcccagctgctt

SEQ ID NO: 9850 - RNA, 20 nt, synthetic construct
  misc_feature 1..20: note = source = /note="Description of Artificial Sequence: Synthetic oligonucleotide"
  source 1..20: mol_type = other RNA
tatagtcccagctgcttggg

SEQ ID NO: 9851 - RNA, 20 nt, synthetic construct
  misc_feature 1..20: note = source = /note="Description of Artificial Sequence: Synthetic oligonucleotide"
  source 1..20: mol_type = other RNA
cccagctgcttgggaggttg

SEQ ID NO: 9852 - RNA, 20 nt, synthetic construct
  misc_feature 1..20: note = source = /note="Description of Artificial Sequence: Synthetic oligonucleotide"
  source 1..20: mol_type = other RNA
cctgagaatcgcttgaatcc

SEQ ID NO: 9853 - RNA, 20 nt, synthetic construct
  misc_feature 1..20: note = source = /note="Description of Artificial Sequence: Synthetic oligonucleotide"
  source 1..20: mol_type = other RNA
gagaatcgcttgaatccagg

SEQ ID NO: 9854 - RNA, 20 nt, synthetic construct
  misc_feature 1..20: note = source = /note="Description of Artificial Sequence: Synthetic oligonucleotide"
  source 1..20: mol_type = other RNA
cgcttgaatccaggaggcag

SEQ ID NO: 9855 - RNA, 20 nt, synthetic construct
  misc_feature 1..20: note = source = /note="Description of Artificial Sequence: Synthetic oligonucleotide"
  source 1..20: mol_type = other RNA
cgtgccactgcactccagcc

SEQ ID NO: 9856 - RNA, 20 nt, synthetic construct
  misc_feature 1..20: note = source = /note="Description of Artificial Sequence: Synthetic oligonucleotide"
  source 1..20: mol_type = other RNA
gtgccactgcactccagcct

SEQ ID NO: 9857 - RNA, 20 nt, synthetic construct
  misc_feature 1..20: note = source = /note="Description of Artificial Sequence: Synthetic oligonucleotide"
  source 1..20: mol_type = other RNA
ctccagcctgggtgacagag

SEQ ID NO: 9858 - RNA, 20 nt, synthetic construct
  misc_feature 1..20: note = source = /note="Description of Artificial Sequence: Synthetic oligonucleotide"
  source 1..20: mol_type = other RNA
tccagcctgggtgacagagt

SEQ ID NO: 9859 - RNA, 20 nt, synthetic construct
  misc_feature 1..20: note = source = /note="Description of Artificial Sequence: Synthetic oligonucleotide"
  source 1..20: mol_type = other RNA
tacacaccattatacacaag

SEQ ID NO: 9860 - RNA, 20 nt, synthetic construct
  misc_feature 1..20: note = source = /note="Description of Artificial Sequence: Synthetic oligonucleotide"
  source 1..20: mol_type = other RNA
tagacccaacatatataata

SEQ ID NO: 9861 - RNA, 20 nt, synthetic construct
  misc_feature 1..20: note = source = /note="Description of Artificial Sequence: Synthetic oligonucleotide"
  source 1..20: mol_type = other RNA
tttaacaaagatgattcaat

SEQ ID NO: 9862 - RNA, 20 nt, synthetic construct
  misc_feature 1..20: note = source = /note="Description of Artificial Sequence: Synthetic oligonucleotide"
  source 1..20: mol_type = other RNA
ttaacaaagatgattcaatt

SEQ ID NO: 9863 - RNA, 20 nt, synthetic construct
  misc_feature 1..20: note = source = /note="Description of Artificial Sequence: Synthetic oligonucleotide"
  source 1..20: mol_type = other RNA
caaagatgattcaattggga

SEQ ID NO: 9864 - RNA, 20 nt, synthetic construct
  misc_feature 1..20: note = source = /note="Description of Artificial Sequence: Synthetic oligonucleotide"
  source 1..20: mol_type = other RNA
aaagatgattcaattgggaa

SEQ ID NO: 9865 - RNA, 20 nt, synthetic construct
  misc_feature 1..20: note = source = /note="Description of Artificial Sequence: Synthetic oligonucleotide"
  source 1..20: mol_type = other RNA
tccagtagtatctgaacagt

SEQ ID NO: 9866 - RNA, 20 nt, synthetic construct
  misc_feature 1..20: note = source = /note="Description of Artificial Sequence: Synthetic oligonucleotide"
  source 1..20: mol_type = other RNA
tgaacagttggaaagccata

SEQ ID NO: 9867 - RNA, 20 nt, synthetic construct
  misc_feature 1..20: note = source = /note="Description of Artificial Sequence: Synthetic oligonucleotide"
  source 1..20: mol_type = other RNA
gaacagttggaaagccataa

SEQ ID NO: 9868 - RNA, 20 nt, synthetic construct
  misc_feature 1..20: note = source = /note="Description of Artificial Sequence: Synthetic oligonucleotide"
  source 1..20: mol_type = other RNA
ggaaagccataagggaaaaa

SEQ ID NO: 9869 - RNA, 20 nt, synthetic construct
  misc_feature 1..20: note = source = /note="Description of Artificial Sequence: Synthetic oligonucleotide"
  source 1..20: mol_type = other RNA
tagttgtctgagaacaaagc

SEQ ID NO: 9870 - RNA, 20 nt, synthetic construct
  misc_feature 1..20: note = source = /note="Description of Artificial Sequence: Synthetic oligonucleotide"
  source 1..20: mol_type = other RNA
gcaggaagcatgaattatac

SEQ ID NO: 9871 - RNA, 20 nt, synthetic construct
  misc_feature 1..20: note = source = /note="Description of Artificial Sequence: Synthetic oligonucleotide"
  source 1..20: mol_type = other RNA
caggaagcatgaattataca

SEQ ID NO: 9872 - RNA, 20 nt, synthetic construct
  misc_feature 1..20: note = source = /note="Description of Artificial Sequence: Synthetic oligonucleotide"
  source 1..20: mol_type = other RNA
aggaagcatgaattatacag

SEQ ID NO: 9873 - RNA, 20 nt, synthetic construct
  misc_feature 1..20: note = source = /note="Description of Artificial Sequence: Synthetic oligonucleotide"
  source 1..20: mol_type = other RNA
atgaattatacaggggcatg

SEQ ID NO: 9874 - RNA, 20 nt, synthetic construct
  misc_feature 1..20: note = source = /note="Description of Artificial Sequence: Synthetic oligonucleotide"
  source 1..20: mol_type = other RNA
aatgaatatgtactttattt

SEQ ID NO: 9875 - RNA, 20 nt, synthetic construct
  misc_feature 1..20: note = source = /note="Description of Artificial Sequence: Synthetic oligonucleotide"
  source 1..20: mol_type = other RNA
aactcaaatagcatacttta

SEQ ID NO: 9876 - RNA, 20 nt, synthetic construct
  misc_feature 1..20: note = source = /note="Description of Artificial Sequence: Synthetic oligonucleotide"
  source 1..20: mol_type = other RNA
gtgtcattccattttgtttc

SEQ ID NO: 9877 - RNA, 20 nt, synthetic construct
  misc_feature 1..20: note = source = /note="Description of Artificial Sequence: Synthetic oligonucleotide"
  source 1..20: mol_type = other RNA
catttttttaaagttctaaa

SEQ ID NO: 9878 - RNA, 20 nt, synthetic construct
  misc_feature 1..20: note = source = /note="Description of Artificial Sequence: Synthetic oligonucleotide"
  source 1..20: mol_type = other RNA
tctaaatactagtgagtttt

SEQ ID NO: 9879 - RNA, 20 nt, synthetic construct
  misc_feature 1..20: note = source = /note="Description of Artificial Sequence: Synthetic oligonucleotide"
  source 1..20: mol_type = other RNA
tcaaaaatatttttggacat

SEQ ID NO: 9880 - RNA, 20 nt, synthetic construct
  misc_feature 1..20: note = source = /note="Description of Artificial Sequence: Synthetic oligonucleotide"
  source 1..20: mol_type = other RNA
cattgtttcaaaaatatttt

SEQ ID NO: 9881 - RNA, 20 nt, synthetic construct
  misc_feature 1..20: note = source = /note="Description of Artificial Sequence: Synthetic oligonucleotide"
  source 1..20: mol_type = other RNA
cagtggtttcaacaattaag

SEQ ID NO: 9882 - RNA, 20 nt, synthetic construct
  misc_feature 1..20: note = source = /note="Description of Artificial Sequence: Synthetic oligonucleotide"
  source 1..20: mol_type = other RNA
ctcgaaactgaacactgcag

SEQ ID NO: 9883 - RNA, 20 nt, synthetic construct
  misc_feature 1..20: note = source = /note="Description of Artificial Sequence: Synthetic oligonucleotide"
  source 1..20: mol_type = other RNA
aaaaaaaatgtacttttgta

SEQ ID NO: 9884 - RNA, 20 nt, synthetic construct
  misc_feature 1..20: note = source = /note="Description of Artificial Sequence: Synthetic oligonucleotide"
  source 1..20: mol_type = other RNA
gtagttagaacctatagctt

SEQ ID NO: 9885 - RNA, 20 nt, synthetic construct
  misc_feature 1..20: note = source = /note="Description of Artificial Sequence: Synthetic oligonucleotide"
  source 1..20: mol_type = other RNA
ggtagttagaacctatagct

SEQ ID NO: 9886 - RNA, 20 nt, synthetic construct
  misc_feature 1..20: note = source = /note="Description of Artificial Sequence: Synthetic oligonucleotide"
  source 1..20: mol_type = other RNA
tatagacttgcagtaaaaat

SEQ ID NO: 9887 - RNA, 20 nt, synthetic construct
  misc_feature 1..20: note = source = /note="Description of Artificial Sequence: Synthetic oligonucleotide"
  source 1..20: mol_type = other RNA
tcagcaaaatctgacacatc

SEQ ID NO: 9888 - RNA, 20 nt, synthetic construct
  misc_feature 1..20: note = source = /note="Description of Artificial Sequence: Synthetic oligonucleotide"
  source 1..20: mol_type = other RNA
aagtcaaggtcaaacaaaaa

SEQ ID NO: 9889 - RNA, 20 nt, synthetic construct
  misc_feature 1..20: note = source = /note="Description of Artificial Sequence: Synthetic oligonucleotide"
  source 1..20: mol_type = other RNA
ttgcttggtgtatgaagtca

SEQ ID NO: 9890 - RNA, 20 nt, synthetic construct
  misc_feature 1..20: note = source = /note="Description of Artificial Sequence: Synthetic oligonucleotide"
  source 1..20: mol_type = other RNA
aaaaaaaaaatgtttttgct

SEQ ID NO: 9891 - RNA, 20 nt, synthetic construct
  misc_feature 1..20: note = source = /note="Description of Artificial Sequence: Synthetic oligonucleotide"
  source 1..20: mol_type = other RNA
ttcttaaagacagacagaga

SEQ ID NO: 9892 - RNA, 20 nt, synthetic construct
  misc_feature 1..20: note = source = /note="Description of Artificial Sequence: Synthetic oligonucleotide"
  source 1..20: mol_type = other RNA
cggtggcatgggtcgaaaga

SEQ ID NO: 9893 - RNA, 20 nt, synthetic construct
  misc_feature 1..20: note = source = /note="Description of Artificial Sequence: Synthetic oligonucleotide"
  source 1..20: mol_type = other RNA
agggtttcacaaccctaatt

SEQ ID NO: 9894 - RNA, 20 nt, synthetic construct
  misc_feature 1..20: note = source = /note="Description of Artificial Sequence: Synthetic oligonucleotide"
  source 1..20: mol_type = other RNA
ggaaccggagggtttcacaa

SEQ ID NO: 9895 - RNA, 20 nt, synthetic construct
  misc_feature 1..20: note = source = /note="Description of Artificial Sequence: Synthetic oligonucleotide"
  source 1..20: mol_type = other RNA
cggaaccggagggtttcaca

SEQ ID NO: 9896 - RNA, 20 nt, synthetic construct
  misc_feature 1..20: note = source = /note="Description of Artificial Sequence: Synthetic oligonucleotide"
  source 1..20: mol_type = other RNA
gagtccactaggtggacgga

SEQ ID NO: 9897 - RNA, 20 nt, synthetic construct
  misc_feature 1..20: note = source = /note="Description of Artificial Sequence: Synthetic oligonucleotide"
  source 1..20: mol_type = other RNA
ccagatcttgaggactggag

SEQ ID NO: 9898 - RNA, 20 nt, synthetic construct
  misc_feature 1..20: note = source = /note="Description of Artificial Sequence: Synthetic oligonucleotide"
  source 1..20: mol_type = other RNA
aaagaggtacaactagtccg

SEQ ID NO: 9899 - RNA, 20 nt, synthetic construct
  misc_feature 1..20: note = source = /note="Description of Artificial Sequence: Synthetic oligonucleotide"
  source 1..20: mol_type = other RNA
tcccaaagaggtacaactag

SEQ ID NO: 9900 - RNA, 20 nt, synthetic construct
  misc_feature 1..20: note = source = /note="Description of Artificial Sequence: Synthetic oligonucleotide"
  source 1..20: mol_type = other RNA
aacataaaaatcatctctgt

SEQ ID NO: 9901 - RNA, 20 nt, synthetic construct
  misc_feature 1..20: note = source = /note="Description of Artificial Sequence: Synthetic oligonucleotide"
  source 1..20: mol_type = other RNA
aaacataaaaatcatctctg

SEQ ID NO: 9902 - RNA, 20 nt, synthetic construct
  misc_feature 1..20: note = source = /note="Description of Artificial Sequence: Synthetic oligonucleotide"
  source 1..20: mol_type = other RNA
aaggctcatcgaccctaatg

SEQ ID NO: 9903 - RNA, 20 nt, synthetic construct
  misc_feature 1..20: note = source = /note="Description of Artificial Sequence: Synthetic oligonucleotide"
  source 1..20: mol_type = other RNA
ggaatcggaaggctcatcga

SEQ ID NO: 9904 - RNA, 20 nt, synthetic construct
  misc_feature 1..20: note = source = /note="Description of Artificial Sequence: Synthetic oligonucleotide"
  source 1..20: mol_type = other RNA
cggaatcggaaggctcatcg

SEQ ID NO: 9905 - RNA, 20 nt, synthetic construct
  misc_feature 1..20: note = source = /note="Description of Artificial Sequence: Synthetic oligonucleotide"
  source 1..20: mol_type = other RNA
gtgacgttggaggtggaggg

SEQ ID NO: 9906 - RNA, 20 nt, synthetic construct
  misc_feature 1..20: note = source = /note="Description of Artificial Sequence: Synthetic oligonucleotide"
  source 1..20: mol_type = other RNA
cctcacgttaccaaactgaa

SEQ ID NO: 9907 - RNA, 20 nt, synthetic construct
  misc_feature 1..20: note = source = /note="Description of Artificial Sequence: Synthetic oligonucleotide"
  source 1..20: mol_type = other RNA
aacggatccgacctcacgtt

SEQ ID NO: 9908 - RNA, 20 nt, synthetic construct
  misc_feature 1..20: note = source = /note="Description of Artificial Sequence: Synthetic oligonucleotide"
  source 1..20: mol_type = other RNA
aagcgagaacaacggatccg

SEQ ID NO: 9909 - RNA, 20 nt, synthetic construct
  misc_feature 1..20: note = source = /note="Description of Artificial Sequence: Synthetic oligonucleotide"
  source 1..20: mol_type = other RNA
ctcaaagcgagaacaacgga

SEQ ID NO: 9910 - RNA, 20 nt, synthetic construct
  misc_feature 1..20: note = source = /note="Description of Artificial Sequence: Synthetic oligonucleotide"
  source 1..20: mol_type = other RNA
aaaaaaaaaaaaaaaactct

SEQ ID NO: 9911 - RNA, 20 nt, synthetic construct
  misc_feature 1..20: note = source = /note="Description of Artificial Sequence: Synthetic oligonucleotide"
  source 1..20: mol_type = other RNA
aggacccatcgaccctaatg

SEQ ID NO: 9912 - RNA, 20 nt, synthetic construct
  misc_feature 1..20: note = source = /note="Description of Artificial Sequence: Synthetic oligonucleotide"
  source 1..20: mol_type = other RNA
aggaccagaggacccatcga

SEQ ID NO: 9913 - RNA, 20 nt, synthetic construct
  misc_feature 1..20: note = source = /note="Description of Artificial Sequence: Synthetic oligonucleotide"
  source 1..20: mol_type = other RNA
gaggaccagaggacccatcg

SEQ ID NO: 9914 - RNA, 20 nt, synthetic construct
  misc_feature 1..20: note = source = /note="Description of Artificial Sequence: Synthetic oligonucleotide"
  source 1..20: mol_type = other RNA
ggagtctgaggaccagagga

SEQ ID NO: 9915 - RNA, 20 nt, synthetic construct
  misc_feature 1..20: note = source = /note="Description of Artificial Sequence: Synthetic oligonucleotide"
  source 1..20: mol_type = other RNA
cggagtctgaggaccagagg

SEQ ID NO: 9916 - RNA, 20 nt, synthetic construct
  misc_feature 1..20: note = source = /note="Description of Artificial Sequence: Synthetic oligonucleotide"
  source 1..20: mol_type = other RNA
agtggcgtcggagtctgagg

SEQ ID NO: 9917 - RNA, 20 nt, synthetic construct
  misc_feature 1..20: note = source = /note="Description of Artificial Sequence: Synthetic oligonucleotide"
  source 1..20: mol_type = other RNA
cctcgtgtcactacgttagt

SEQ ID NO: 9918 - RNA, 20 nt, synthetic construct
  misc_feature 1..20: note = source = /note="Description of Artificial Sequence: Synthetic oligonucleotide"
  source 1..20: mol_type = other RNA
cagtagaaacagtgggtcct

SEQ ID NO: 9919 - RNA, 20 nt, synthetic construct
  misc_feature 1..20: note = source = /note="Description of Artificial Sequence: Synthetic oligonucleotide"
  source 1..20: mol_type = other RNA
gacccagtagaaacagtggg

SEQ ID NO: 9920 - RNA, 20 nt, synthetic construct
  misc_feature 1..20: note = source = /note="Description of Artificial Sequence: Synthetic oligonucleotide"
  source 1..20: mol_type = other RNA
aacgaaaaaaaaatcttaga

SEQ ID NO: 9921 - RNA, 20 nt, synthetic construct
  misc_feature 1..20: note = source = /note="Description of Artificial Sequence: Synthetic oligonucleotide"
  source 1..20: mol_type = other RNA
aaacgaaaaaaaaatcttag

SEQ ID NO: 9922 - RNA, 20 nt, synthetic construct
  misc_feature 1..20: note = source = /note="Description of Artificial Sequence: Synthetic oligonucleotide"
  source 1..20: mol_type = other RNA
gtctctgtctccactaaaga

SEQ ID NO: 9923 - RNA, 20 nt, synthetic construct
  misc_feature 1..20: note = source = /note="Description of Artificial Sequence: Synthetic oligonucleotide"
  source 1..20: mol_type = other RNA
gcacattcttctattccagc

SEQ ID NO: 9924 - RNA, 20 nt, synthetic construct
  misc_feature 1..20: note = source = /note="Description of Artificial Sequence: Synthetic oligonucleotide"
  source 1..20: mol_type = other RNA
gtgacatctagtctactttt

SEQ ID NO: 9925 - RNA, 20 nt, synthetic construct
  misc_feature 1..20: note = source = /note="Description of Artificial Sequence: Synthetic oligonucleotide"
  source 1..20: mol_type = other RNA
tgtgacatctagtctacttt

SEQ ID NO: 9926 - RNA, 20 nt, synthetic construct
  misc_feature 1..20: note = source = /note="Description of Artificial Sequence: Synthetic oligonucleotide"
  source 1..20: mol_type = other RNA
agatctttatttagcgtcta

SEQ ID NO: 9927 - RNA, 20 nt, synthetic construct
  misc_feature 1..20: note = source = /note="Description of Artificial Sequence: Synthetic oligonucleotide"
  source 1..20: mol_type = other RNA
acacacttgaaacagcccaa

SEQ ID NO: 9928 - RNA, 20 nt, synthetic construct
  misc_feature 1..20: note = source = /note="Description of Artificial Sequence: Synthetic oligonucleotide"
  source 1..20: mol_type = other RNA
taagttatatttcccttact

SEQ ID NO: 9929 - RNA, 20 nt, synthetic construct
  misc_feature 1..20: note = source = /note="Description of Artificial Sequence: Synthetic oligonucleotide"
  source 1..20: mol_type = other RNA
ttaattcctgccatttcttt

SEQ ID NO: 9930 - RNA, 20 nt, synthetic construct
  misc_feature 1..20: note = source = /note="Description of Artificial Sequence: Synthetic oligonucleotide"
  source 1..20: mol_type = other RNA
atagaactacctgtccaaac

SEQ ID NO: 9931 - RNA, 20 nt, synthetic construct
  misc_feature 1..20: note = source = /note="Description of Artificial Sequence: Synthetic oligonucleotide"
  source 1..20: mol_type = other RNA
ctcatgcctaaaatgattga

SEQ ID NO: 9932 - RNA, 20 nt, synthetic construct
  misc_feature 1..20: note = source = /note="Description of Artificial Sequence: Synthetic oligonucleotide"
  source 1..20: mol_type = other RNA
tcccccagttcttacttcat

SEQ ID NO: 9933 - RNA, 20 nt, synthetic construct
  misc_feature 1..20: note = source = /note="Description of Artificial Sequence: Synthetic oligonucleotide"
  source 1..20: mol_type = other RNA
gctcctgtatactctgctct

SEQ ID NO: 9934 - RNA, 20 nt, synthetic construct
  misc_feature 1..20: note = source = /note="Description of Artificial Sequence: Synthetic oligonucleotide"
  source 1..20: mol_type = other RNA
tgctcctgtatactctgctc

SEQ ID NO: 9935 - RNA, 20 nt, synthetic construct
  misc_feature 1..20: note = source = /note="Description of Artificial Sequence: Synthetic oligonucleotide"
  source 1..20: mol_type = other RNA
aagagtagctaaatcatttt

SEQ ID NO: 9936 - RNA, 20 nt, synthetic construct
  misc_feature 1..20: note = source = /note="Description of Artificial Sequence: Synthetic oligonucleotide"
  source 1..20: mol_type = other RNA
tgggacgttaaagtccacag

SEQ ID NO: 9937 - RNA, 20 nt, synthetic construct
  misc_feature 1..20: note = source = /note="Description of Artificial Sequence: Synthetic oligonucleotide"
  source 1..20: mol_type = other RNA
aaaaaaaaaaaaaaatgttt

SEQ ID NO: 9938 - RNA, 20 nt, synthetic construct
  misc_feature 1..20: note = source = /note="Description of Artificial Sequence: Synthetic oligonucleotide"
  source 1..20: mol_type = other RNA
caaaaaaaaaaaaaaatgtt

SEQ ID NO: 9939 - RNA, 20 nt, synthetic construct
  misc_feature 1..20: note = source = /note="Description of Artificial Sequence: Synthetic oligonucleotide"
  source 1..20: mol_type = other RNA
cggtccataataagaatcaa

SEQ ID NO: 9940 - RNA, 20 nt, synthetic construct
  misc_feature 1..20: note = source = /note="Description of Artificial Sequence: Synthetic oligonucleotide"
  source 1..20: mol_type = other RNA
acggtccataataagaatca

SEQ ID NO: 9941 - RNA, 20 nt, synthetic construct
  misc_feature 1..20: note = source = /note="Description of Artificial Sequence: Synthetic oligonucleotide"
  source 1..20: mol_type = other RNA
aaatagtttcaagtatgaga

SEQ ID NO: 9942 - RNA, 20 nt, synthetic construct
  misc_feature 1..20: note = source = /note="Description of Artificial Sequence: Synthetic oligonucleotide"
  source 1..20: mol_type = other RNA
attttgggtacttaagtttt

SEQ ID NO: 9943 - RNA, 20 nt, synthetic construct
  misc_feature 1..20: note = source = /note="Description of Artificial Sequence: Synthetic oligonucleotide"
  source 1..20: mol_type = other RNA
atttgatggcttcatatttt

SEQ ID NO: 9944 - RNA, 20 nt, synthetic construct
  misc_feature 1..20: note = source = /note="Description of Artificial Sequence: Synthetic oligonucleotide"
  source 1..20: mol_type = other RNA
tatttgatggcttcatattt

SEQ ID NO: 9945 - RNA, 20 nt, synthetic construct
  misc_feature 1..20: note = source = /note="Description of Artificial Sequence: Synthetic oligonucleotide"
  source 1..20: mol_type = other RNA
taaaacttgaacatatttga

SEQ ID NO: 9946 - RNA, 20 nt, synthetic construct
  misc_feature 1..20: note = source = /note="Description of Artificial Sequence: Synthetic oligonucleotide"
  source 1..20: mol_type = other RNA
gatttcgtataattgtatgt

SEQ ID NO: 9947 - RNA, 20 nt, synthetic construct
  misc_feature 1..20: note = source = /note="Description of Artificial Sequence: Synthetic oligonucleotide"
  source 1..20: mol_type = other RNA
atgacacacctttgtagtgt

SEQ ID NO: 9948 - RNA, 20 nt, synthetic construct
  misc_feature 1..20: note = source = /note="Description of Artificial Sequence: Synthetic oligonucleotide"
  source 1..20: mol_type = other RNA
accagaagggcacatgacac

SEQ ID NO: 9949 - RNA, 20 nt, synthetic construct
  misc_feature 1..20: note = source = /note="Description of Artificial Sequence: Synthetic oligonucleotide"
  source 1..20: mol_type = other RNA
tgtcgtagatattgtagttt

SEQ ID NO: 9950 - RNA, 20 nt, synthetic construct
  misc_feature 1..20: note = source = /note="Description of Artificial Sequence: Synthetic oligonucleotide"
  source 1..20: mol_type = other RNA
cctccatttctagtttatca

SEQ ID NO: 9951 - RNA, 20 nt, synthetic construct
  misc_feature 1..20: note = source = /note="Description of Artificial Sequence: Synthetic oligonucleotide"
  source 1..20: mol_type = other RNA
gacactcagttggggaatcc

SEQ ID NO: 9952 - RNA, 20 nt, synthetic construct
  misc_feature 1..20: note = source = /note="Description of Artificial Sequence: Synthetic oligonucleotide"
  source 1..20: mol_type = other RNA
tacgacactcagttggggaa

SEQ ID NO: 9953 - RNA, 20 nt, synthetic construct
  misc_feature 1..20: note = source = /note="Description of Artificial Sequence: Synthetic oligonucleotide"
  source 1..20: mol_type = other RNA
agagatacgacactcagttg

SEQ ID NO: 9954 - RNA, 20 nt, synthetic construct
  misc_feature 1..20: note = source = /note="Description of Artificial Sequence: Synthetic oligonucleotide"
  source 1..20: mol_type = other RNA
tagagatacgacactcagtt

SEQ ID NO: 9955 - RNA, 20 nt, synthetic construct
  misc_feature 1..20: note = source = /note="Description of Artificial Sequence: Synthetic oligonucleotide"
  source 1..20: mol_type = other RNA
atagagatacgacactcagt

SEQ ID NO: 9956 - RNA, 20 nt, synthetic construct
  misc_feature 1..20: note = source = /note="Description of Artificial Sequence: Synthetic oligonucleotide"
  source 1..20: mol_type = other RNA
tgaaatcaaggaataaagca

SEQ ID NO: 9957 - RNA, 20 nt, synthetic construct
  misc_feature 1..20: note = source = /note="Description of Artificial Sequence: Synthetic oligonucleotide"
  source 1..20: mol_type = other RNA
aataagacttcatgaaatca

SEQ ID NO: 9958 - RNA, 20 nt, synthetic construct
  misc_feature 1..20: note = source = /note="Description of Artificial Sequence: Synthetic oligonucleotide"
  source 1..20: mol_type = other RNA
gactgacagaagagatgctg

SEQ ID NO: 9959 - RNA, 20 nt, synthetic construct
  misc_feature 1..20: note = source = /note="Description of Artificial Sequence: Synthetic oligonucleotide"
  source 1..20: mol_type = other RNA
aactgaagctctaattccat

SEQ ID NO: 9960 - RNA, 20 nt, synthetic construct
  misc_feature 1..20: note = source = /note="Description of Artificial Sequence: Synthetic oligonucleotide"
  source 1..20: mol_type = other RNA
aaactgaagctctaattcca

SEQ ID NO: 9961 - RNA, 20 nt, synthetic construct
  misc_feature 1..20: note = source = /note="Description of Artificial Sequence: Synthetic oligonucleotide"
  source 1..20: mol_type = other RNA
tactggatagacacgaagaa

SEQ ID NO: 9962 - RNA, 20 nt, synthetic construct
  misc_feature 1..20: note = source = /note="Description of Artificial Sequence: Synthetic oligonucleotide"
  source 1..20: mol_type = other RNA
agagccaaatatatgtctac

SEQ ID NO: 9963 - RNA, 20 nt, synthetic construct
  misc_feature 1..20: note = source = /note="Description of Artificial Sequence: Synthetic oligonucleotide"
  source 1..20: mol_type = other RNA
ctactgttaaattgtaaggc

SEQ ID NO: 9964 - RNA, 20 nt, synthetic construct
  misc_feature 1..20: note = source = /note="Description of Artificial Sequence: Synthetic oligonucleotide"
  source 1..20: mol_type = other RNA
aggtctactgttaaattgta

SEQ ID NO: 9965 - RNA, 20 nt, synthetic construct
  misc_feature 1..20: note = source = /note="Description of Artificial Sequence: Synthetic oligonucleotide"
  source 1..20: mol_type = other RNA
agattgacacctgctatttc

SEQ ID NO: 9966 - RNA, 20 nt, synthetic construct
  misc_feature 1..20: note = source = /note="Description of Artificial Sequence: Synthetic oligonucleotide"
  source 1..20: mol_type = other RNA
acaatttattattggtgtac

SEQ ID NO: 9967 - RNA, 20 nt, synthetic construct
  misc_feature 1..20: note = source = /note="Description of Artificial Sequence: Synthetic oligonucleotide"
  source 1..20: mol_type = other RNA
accattggtaataggtgtac

SEQ ID NO: 9968 - RNA, 20 nt, synthetic construct
  misc_feature 1..20: note = source = /note="Description of Artificial Sequence: Synthetic oligonucleotide"
  source 1..20: mol_type = other RNA
attccaacacgacaagtgat

SEQ ID NO: 9969 - RNA, 20 nt, synthetic construct
  misc_feature 1..20: note = source = /note="Description of Artificial Sequence: Synthetic oligonucleotide"
  source 1..20: mol_type = other RNA
gtattgaaagactaccagat

SEQ ID NO: 9970 - RNA, 20 nt, synthetic construct
  misc_feature 1..20: note = source = /note="Description of Artificial Sequence: Synthetic oligonucleotide"
  source 1..20: mol_type = other RNA
gatttacgtattgaaagact

SEQ ID NO: 9971 - RNA, 20 nt, synthetic construct
  misc_feature 1..20: note = source = /note="Description of Artificial Sequence: Synthetic oligonucleotide"
  source 1..20: mol_type = other RNA
acctttaggtagatttacag

SEQ ID NO: 9972 - RNA, 20 nt, synthetic construct
  misc_feature 1..20: note = source = /note="Description of Artificial Sequence: Synthetic oligonucleotide"
  source 1..20: mol_type = other RNA
cctaaaacacttacttaatg

SEQ ID NO: 9973 - RNA, 20 nt, synthetic construct
  misc_feature 1..20: note = source = /note="Description of Artificial Sequence: Synthetic oligonucleotide"
  source 1..20: mol_type = other RNA
agaggattttttatggtacg

SEQ ID NO: 9974 - RNA, 20 nt, synthetic construct
  misc_feature 1..20: note = source = /note="Description of Artificial Sequence: Synthetic oligonucleotide"
  source 1..20: mol_type = other RNA
tggcccaagtcaagtacgac

SEQ ID NO: 9975 - RNA, 20 nt, synthetic construct
  misc_feature 1..20: note = source = /note="Description of Artificial Sequence: Synthetic oligonucleotide"
  source 1..20: mol_type = other RNA
taacatagatgtgtgctttg

SEQ ID NO: 9976 - RNA, 20 nt, synthetic construct
  misc_feature 1..20: note = source = /note="Description of Artificial Sequence: Synthetic oligonucleotide"
  source 1..20: mol_type = other RNA
ctttggccaaaggaaaatga

SEQ ID NO: 9977 - RNA, 20 nt, synthetic construct
  misc_feature 1..20: note = source = /note="Description of Artificial Sequence: Synthetic oligonucleotide"
  source 1..20: mol_type = other RNA
cctcataaaactttggccaa

SEQ ID NO: 9978 - RNA, 20 nt, synthetic construct
  misc_feature 1..20: note = source = /note="Description of Artificial Sequence: Synthetic oligonucleotide"
  source 1..20: mol_type = other RNA
tatctaacctcataaaactt

SEQ ID NO: 9979 - RNA, 20 nt, synthetic construct
  misc_feature 1..20: note = source = /note="Description of Artificial Sequence: Synthetic oligonucleotide"
  source 1..20: mol_type = other RNA
ggcttcatattatttactgt

SEQ ID NO: 9980 - RNA, 20 nt, synthetic construct
  misc_feature 1..20: note = source = /note="Description of Artificial Sequence: Synthetic oligonucleotide"
  source 1..20: mol_type = other RNA
attaggataaaagtttgtgg

SEQ ID NO: 9981 - RNA, 20 nt, synthetic construct
  misc_feature 1..20: note = source = /note="Description of Artificial Sequence: Synthetic oligonucleotide"
  source 1..20: mol_type = other RNA
tgcattaggataaaagtttg

SEQ ID NO: 9982 - RNA, 20 nt, synthetic construct
  misc_feature 1..20: note = source = /note="Description of Artificial Sequence: Synthetic oligonucleotide"
  source 1..20: mol_type = other RNA
gatcttcatgaacttgcatt

SEQ ID NO: 9983 - RNA, 20 nt, synthetic construct
  misc_feature 1..20: note = source = /note="Description of Artificial Sequence: Synthetic oligonucleotide"
  source 1..20: mol_type = other RNA
tcagagacaaatgaggtagt

SEQ ID NO: 9984 - RNA, 20 nt, synthetic construct
  misc_feature 1..20: note = source = /note="Description of Artificial Sequence: Synthetic oligonucleotide"
  source 1..20: mol_type = other RNA
caaaaaagaatttacacatt

SEQ ID NO: 9985 - RNA, 20 nt, synthetic construct
  misc_feature 1..20: note = source = /note="Description of Artificial Sequence: Synthetic oligonucleotide"
  source 1..20: mol_type = other RNA
gaaaaatgaaggaaagagag

SEQ ID NO: 9986 - RNA, 20 nt, synthetic construct
  misc_feature 1..20: note = source = /note="Description of Artificial Sequence: Synthetic oligonucleotide"
  source 1..20: mol_type = other RNA
ttcatttgaccccataaata

SEQ ID NO: 9987 - RNA, 20 nt, synthetic construct
  misc_feature 1..20: note = source = /note="Description of Artificial Sequence: Synthetic oligonucleotide"
  source 1..20: mol_type = other RNA
agagaagtccttcatttgac

SEQ ID NO: 9988 - RNA, 20 nt, synthetic construct
  misc_feature 1..20: note = source = /note="Description of Artificial Sequence: Synthetic oligonucleotide"
  source 1..20: mol_type = other RNA
gagagaagtccttcatttga

SEQ ID NO: 9989 - RNA, 20 nt, synthetic construct
  misc_feature 1..20: note = source = /note="Description of Artificial Sequence: Synthetic oligonucleotide"
  source 1..20: mol_type = other RNA
tgagagaagtccttcatttg

SEQ ID NO: 9990 - RNA, 20 nt, synthetic construct
  misc_feature 1..20: note = source = /note="Description of Artificial Sequence: Synthetic oligonucleotide"
  source 1..20: mol_type = other RNA
acctcggattatgagagaag

SEQ ID NO: 9991 - RNA, 20 nt, synthetic construct
  misc_feature 1..20: note = source = /note="Description of Artificial Sequence: Synthetic oligonucleotide"
  source 1..20: mol_type = other RNA
acccaaggatgaccgatgtg

SEQ ID NO: 9992 - RNA, 20 nt, synthetic construct
  misc_feature 1..20: note = source = /note="Description of Artificial Sequence: Synthetic oligonucleotide"
  source 1..20: mol_type = other RNA
cccacacaaacccaaggatg

SEQ ID NO: 9993 - RNA, 20 nt, synthetic construct
  misc_feature 1..20: note = source = /note="Description of Artificial Sequence: Synthetic oligonucleotide"
  source 1..20: mol_type = other RNA
tctattccgacccacacaaa

SEQ ID NO: 9994 - RNA, 20 nt, synthetic construct
  misc_feature 1..20: note = source = /note="Description of Artificial Sequence: Synthetic oligonucleotide"
  source 1..20: mol_type = other RNA
ctctattccgacccacacaa

SEQ ID NO: 9995 - RNA, 20 nt, synthetic construct
  misc_feature 1..20: note = source = /note="Description of Artificial Sequence: Synthetic oligonucleotide"
  source 1..20: mol_type = other RNA
gaattatgtctctattccga

SEQ ID NO: 9996 - RNA, 20 nt, synthetic construct
  misc_feature 1..20: note = source = /note="Description of Artificial Sequence: Synthetic oligonucleotide"
  source 1..20: mol_type = other RNA
ggaattatgtctctattccg

SEQ ID NO: 9997 - RNA, 20 nt, synthetic construct
  misc_feature 1..20: note = source = /note="Description of Artificial Sequence: Synthetic oligonucleotide"
  source 1..20: mol_type = other RNA
cagaggaattatgtctctat

SEQ ID NO: 9998 - RNA, 20 nt, synthetic construct
  misc_feature 1..20: note = source = /note="Description of Artificial Sequence: Synthetic oligonucleotide"
  source 1..20: mol_type = other RNA
tatcacttgagagcagtgga

SEQ ID NO: 9999 - RNA, 20 nt, synthetic construct
  misc_feature 1..20: note = source = /note="Description of Artificial Sequence: Synthetic oligonucleotide"
  source 1..20: mol_type = other RNA
gtcttgggagacgtccagag

SEQ ID NO: 10000 - RNA, 20 nt, synthetic construct
  misc_feature 1..20: note = source = /note="Description of Artificial Sequence: Synthetic oligonucleotide"
  source 1..20: mol_type = other RNA
tgacctagtcttgggagacg

SEQ ID NO: 10001 - RNA, 20 nt, synthetic construct
  misc_feature 1..20: note = source = /note="Description of Artificial Sequence: Synthetic oligonucleotide"
  source 1..20: mol_type = other RNA
aaattatgagtcgacttctg

SEQ ID NO: 10002 - RNA, 20 nt, synthetic construct
  misc_feature 1..20: note = source = /note="Description of Artificial Sequence: Synthetic oligonucleotide"
  source 1..20: mol_type = other RNA
caagaaagggatggatcgga

SEQ ID NO: 10003 - RNA, 20 nt, synthetic construct
  misc_feature 1..20: note = source = /note="Description of Artificial Sequence: Synthetic oligonucleotide"
  source 1..20: mol_type = other RNA
taagacggacgaagaagact

SEQ ID NO: 10004 - RNA, 20 nt, synthetic construct
  misc_feature 1..20: note = source = /note="Description of Artificial Sequence: Synthetic oligonucleotide"
  source 1..20: mol_type = other RNA
gtccaggacacactctagtt

SEQ ID NO: 10005 - RNA, 20 nt, synthetic construct
  misc_feature 1..20: note = source = /note="Description of Artificial Sequence: Synthetic oligonucleotide"
  source 1..20: mol_type = other RNA
ggtccaggacacactctagt

SEQ ID NO: 10006 - RNA, 20 nt, synthetic construct
  misc_feature 1..20: note = source = /note="Description of Artificial Sequence: Synthetic oligonucleotide"
  source 1..20: mol_type = other RNA
catactagttcttgataagg

SEQ ID NO: 10007 - RNA, 20 nt, synthetic construct
  misc_feature 1..20: note = source = /note="Description of Artificial Sequence: Synthetic oligonucleotide"
  source 1..20: mol_type = other RNA
acttcagaagaggcagaccg

SEQ ID NO: 10008 - RNA, 20 nt, synthetic construct
  misc_feature 1..20: note = source = /note="Description of Artificial Sequence: Synthetic oligonucleotide"
  source 1..20: mol_type = other RNA
taatacttcagaagaggcag

SEQ ID NO: 10009 - RNA, 20 nt, synthetic construct
  misc_feature 1..20: note = source = /note="Description of Artificial Sequence: Synthetic oligonucleotide"
  source 1..20: mol_type = other RNA
gtttaaatgaagatgatggt

SEQ ID NO: 10010 - RNA, 20 nt, synthetic construct
  misc_feature 1..20: note = source = /note="Description of Artificial Sequence: Synthetic oligonucleotide"
  source 1..20: mol_type = other RNA
taaaattcgtaaaaatctac

SEQ ID NO: 10011 - RNA, 20 nt, synthetic construct
  misc_feature 1..20: note = source = /note="Description of Artificial Sequence: Synthetic oligonucleotide"
  source 1..20: mol_type = other RNA
atttaatgaatcttagtcaa

SEQ ID NO: 10012 - RNA, 20 nt, synthetic construct
  misc_feature 1..20: note = source = /note="Description of Artificial Sequence: Synthetic oligonucleotide"
  source 1..20: mol_type = other RNA
ctgatatttaaaatggaaca

SEQ ID NO: 10013 - RNA, 20 nt, synthetic construct
  misc_feature 1..20: note = source = /note="Description of Artificial Sequence: Synthetic oligonucleotide"
  source 1..20: mol_type = other RNA
catacggaacataaaagact

SEQ ID NO: 10014 - RNA, 20 nt, synthetic construct
  misc_feature 1..20: note = source = /note="Description of Artificial Sequence: Synthetic oligonucleotide"
  source 1..20: mol_type = other RNA
aagacggacaaggggtcatt

SEQ ID NO: 10015 - RNA, 20 nt, synthetic construct
  misc_feature 1..20: note = source = /note="Description of Artificial Sequence: Synthetic oligonucleotide"
  source 1..20: mol_type = other RNA
catagtgtatacagtcaaga

SEQ ID NO: 10016 - RNA, 20 nt, synthetic construct
  misc_feature 1..20: note = source = /note="Description of Artificial Sequence: Synthetic oligonucleotide"
  source 1..20: mol_type = other RNA
acatagtgtatacagtcaag

SEQ ID NO: 10017 - RNA, 20 nt, synthetic construct
  misc_feature 1..20: note = source = /note="Description of Artificial Sequence: Synthetic oligonucleotide"
  source 1..20: mol_type = other RNA
tagtgagagtacgaaaggag

SEQ ID NO: 10018 - RNA, 20 nt, synthetic construct
  misc_feature 1..20: note = source = /note="Description of Artificial Sequence: Synthetic oligonucleotide"
  source 1..20: mol_type = other RNA
tgaagatcttccagtaacat

SEQ ID NO: 10019 - RNA, 20 nt, synthetic construct
  misc_feature 1..20: note = source = /note="Description of Artificial Sequence: Synthetic oligonucleotide"
  source 1..20: mol_type = other RNA
gtgaagatcttccagtaaca

SEQ ID NO: 10020 - RNA, 20 nt, synthetic construct
  misc_feature 1..20: note = source = /note="Description of Artificial Sequence: Synthetic oligonucleotide"
  source 1..20: mol_type = other RNA
tatataaaaagtgaagatct

SEQ ID NO: 10021 - RNA, 20 nt, synthetic construct
  misc_feature 1..20: note = source = /note="Description of Artificial Sequence: Synthetic oligonucleotide"
  source 1..20: mol_type = other RNA
cacattgttataaccgatta

SEQ ID NO: 10022 - RNA, 20 nt, synthetic construct
  misc_feature 1..20: note = source = /note="Description of Artificial Sequence: Synthetic oligonucleotide"
  source 1..20: mol_type = other RNA
tatataatcacattgttata

SEQ ID NO: 10023 - RNA, 20 nt, synthetic construct
  misc_feature 1..20: note = source = /note="Description of Artificial Sequence: Synthetic oligonucleotide"
  source 1..20: mol_type = other RNA
aagacagagggtggaggaag

SEQ ID NO: 10024 - RNA, 20 nt, synthetic construct
  misc_feature 1..20: note = source = /note="Description of Artificial Sequence: Synthetic oligonucleotide"
  source 1..20: mol_type = other RNA
cttgtttagactttttttaa

SEQ ID NO: 10025 - RNA, 20 nt, synthetic construct
  misc_feature 1..20: note = source = /note="Description of Artificial Sequence: Synthetic oligonucleotide"
  source 1..20: mol_type = other RNA
cgactcgacgactctagaca

SEQ ID NO: 10026 - RNA, 20 nt, synthetic construct
  misc_feature 1..20: note = source = /note="Description of Artificial Sequence: Synthetic oligonucleotide"
  source 1..20: mol_type = other RNA
acgactcgacgactctagac

SEQ ID NO: 10027 - RNA, 20 nt, synthetic construct
  misc_feature 1..20: note = source = /note="Description of Artificial Sequence: Synthetic oligonucleotide"
  source 1..20: mol_type = other RNA
acagaaacaaaaaattagac

SEQ ID NO: 10028 - RNA, 20 nt, synthetic construct
  misc_feature 1..20: note = source = /note="Description of Artificial Sequence: Synthetic oligonucleotide"
  source 1..20: mol_type = other RNA
tacagaaacaaaaaattaga

SEQ ID NO: 10029 - RNA, 20 nt, synthetic construct
  misc_feature 1..20: note = source = /note="Description of Artificial Sequence: Synthetic oligonucleotide"
  source 1..20: mol_type = other RNA
atacagaaacaaaaaattag

SEQ ID NO: 10030 - RNA, 20 nt, synthetic construct
  misc_feature 1..20: note = source = /note="Description of Artificial Sequence: Synthetic oligonucleotide"
  source 1..20: mol_type = other RNA
taaccaatatataaagaccc

SEQ ID NO: 10031 - RNA, 20 nt, synthetic construct
  misc_feature 1..20: note = source = /note="Description of Artificial Sequence: Synthetic oligonucleotide"
  source 1..20: mol_type = other RNA
aagtaaccaatatataaaga

SEQ ID NO: 10032 - RNA, 20 nt, synthetic construct
  misc_feature 1..20: note = source = /note="Description of Artificial Sequence: Synthetic oligonucleotide"
  source 1..20: mol_type = other RNA
aaagtaaccaatatataaag

SEQ ID NO: 10033 - RNA, 20 nt, synthetic construct
  misc_feature 1..20: note = source = /note="Description of Artificial Sequence: Synthetic oligonucleotide"
  source 1..20: mol_type = other RNA
aaaaactctcaacaaaagta

SEQ ID NO: 10034 - RNA, 20 nt, synthetic construct
  misc_feature 1..20: note = source = /note="Description of Artificial Sequence: Synthetic oligonucleotide"
  source 1..20: mol_type = other RNA
aatttcacgatcaaacaacc

SEQ ID NO: 10035 - RNA, 20 nt, synthetic construct
  misc_feature 1..20: note = source = /note="Description of Artificial Sequence: Synthetic oligonucleotide"
  source 1..20: mol_type = other RNA
aaaaatttcacgatcaaaca

SEQ ID NO: 10036 - RNA, 20 nt, synthetic construct
  misc_feature 1..20: note = source = /note="Description of Artificial Sequence: Synthetic oligonucleotide"
  source 1..20: mol_type = other RNA
tagtacaagaaagaaggact

SEQ ID NO: 10037 - RNA, 20 nt, synthetic construct
  misc_feature 1..20: note = source = /note="Description of Artificial Sequence: Synthetic oligonucleotide"
  source 1..20: mol_type = other RNA
acaactagacctaaagacag

SEQ ID NO: 10038 - RNA, 20 nt, synthetic construct
  misc_feature 1..20: note = source = /note="Description of Artificial Sequence: Synthetic oligonucleotide"
  source 1..20: mol_type = other RNA
aagtaaagtaatacaactag

SEQ ID NO: 10039 - RNA, 20 nt, synthetic construct
  misc_feature 1..20: note = source = /note="Description of Artificial Sequence: Synthetic oligonucleotide"
  source 1..20: mol_type = other RNA
aaaaaaaaaaatcaccaaat

SEQ ID NO: 10040 - RNA, 20 nt, synthetic construct
  misc_feature 1..20: note = source = /note="Description of Artificial Sequence: Synthetic oligonucleotide"
  source 1..20: mol_type = other RNA
tgaaaaaaaaaaaaaaaatc

SEQ ID NO: 10041 - RNA, 20 nt, synthetic construct
  misc_feature 1..20: note = source = /note="Description of Artificial Sequence: Synthetic oligonucleotide"
  source 1..20: mol_type = other RNA
aaagtaaaaagacagaaatg

SEQ ID NO: 10042 - RNA, 20 nt, synthetic construct
  misc_feature 1..20: note = source = /note="Description of Artificial Sequence: Synthetic oligonucleotide"
  source 1..20: mol_type = other RNA
atataaaaatttttgtaaaa

SEQ ID NO: 10043 - RNA, 20 nt, synthetic construct
  misc_feature 1..20: note = source = /note="Description of Artificial Sequence: Synthetic oligonucleotide"
  source 1..20: mol_type = other RNA
aaaaatataaatagaaaaaa

SEQ ID NO: 10044 - RNA, 20 nt, synthetic construct
  misc_feature 1..20: note = source = /note="Description of Artificial Sequence: Synthetic oligonucleotide"
  source 1..20: mol_type = other RNA
tacaccaacaactatgtcaa

SEQ ID NO: 10045 - RNA, 20 nt, synthetic construct
  misc_feature 1..20: note = source = /note="Description of Artificial Sequence: Synthetic oligonucleotide"
  source 1..20: mol_type = other RNA
ttacaccaacaactatgtca

SEQ ID NO: 10046 - RNA, 20 nt, synthetic construct
  misc_feature 1..20: note = source = /note="Description of Artificial Sequence: Synthetic oligonucleotide"
  source 1..20: mol_type = other RNA
ttttggtaaatgtaaattac

SEQ ID NO: 10047 - RNA, 20 nt, synthetic construct
  misc_feature 1..20: note = source = /note="Description of Artificial Sequence: Synthetic oligonucleotide"
  source 1..20: mol_type = other RNA
ttcgagacggaatattaatc

SEQ ID NO: 10048 - RNA, 20 nt, synthetic construct
  misc_feature 1..20: note = source = /note="Description of Artificial Sequence: Synthetic oligonucleotide"
  source 1..20: mol_type = other RNA
gttcgagacggaatattaat

SEQ ID NO: 10049 - RNA, 20 nt, synthetic construct
  misc_feature 1..20: note = source = /note="Description of Artificial Sequence: Synthetic oligonucleotide"
  source 1..20: mol_type = other RNA
tgttcgagacggaatattaa

SEQ ID NO: 10050 - RNA, 20 nt, synthetic construct
  misc_feature 1..20: note = source = /note="Description of Artificial Sequence: Synthetic oligonucleotide"
  source 1..20: mol_type = other RNA
atataaatttcaccaaaaga

SEQ ID NO: 10051 - RNA, 20 nt, synthetic construct
  misc_feature 1..20: note = source = /note="Description of Artificial Sequence: Synthetic oligonucleotide"
  source 1..20: mol_type = other RNA
aacatagaaatataaatttc

SEQ ID NO: 10052 - RNA, 20 nt, synthetic construct
  misc_feature 1..20: note = source = /note="Description of Artificial Sequence: Synthetic oligonucleotide"
  source 1..20: mol_type = other RNA
cttacaacttataatagttt

SEQ ID NO: 10053 - RNA, 20 nt, synthetic construct
  misc_feature 1..20: note = source = /note="Description of Artificial Sequence: Synthetic oligonucleotide"
  source 1..20: mol_type = other RNA
aaaggtaaatacataaatta

SEQ ID NO: 10054 - RNA, 20 nt, synthetic construct
  misc_feature 1..20: note = source = /note="Description of Artificial Sequence: Synthetic oligonucleotide"
  source 1..20: mol_type = other RNA
gattcatatcgtaatcgaaa

SEQ ID NO: 10055 - RNA, 20 nt, synthetic construct
  misc_feature 1..20: note = source = /note="Description of Artificial Sequence: Synthetic oligonucleotide"
  source 1..20: mol_type = other RNA
acagaacaaggaatagaatc

SEQ ID NO: 10056 - RNA, 20 nt, synthetic construct
  misc_feature 1..20: note = source = /note="Description of Artificial Sequence: Synthetic oligonucleotide"
  source 1..20: mol_type = other RNA
aacagaacaaggaatagaat

SEQ ID NO: 10057 - RNA, 20 nt, synthetic construct
  misc_feature 1..20: note = source = /note="Description of Artificial Sequence: Synthetic oligonucleotide"
  source 1..20: mol_type = other RNA
caacagaacaaggaatagaa

SEQ ID NO: 10058 - RNA, 20 nt, synthetic construct
  misc_feature 1..20: note = source = /note="Description of Artificial Sequence: Synthetic oligonucleotide"
  source 1..20: mol_type = other RNA
atcttcgtcaaccaattttt

SEQ ID NO: 10059 - RNA, 20 nt, synthetic construct
  misc_feature 1..20: note = source = /note="Description of Artificial Sequence: Synthetic oligonucleotide"
  source 1..20: mol_type = other RNA
actacaacttatcttcgtca

SEQ ID NO: 10060 - RNA, 20 nt, synthetic construct
  misc_feature 1..20: note = source = /note="Description of Artificial Sequence: Synthetic oligonucleotide"
  source 1..20: mol_type = other RNA
gtatataattaaagtaaaag

SEQ ID NO: 10061 - RNA, 20 nt, synthetic construct
  misc_feature 1..20: note = source = /note="Description of Artificial Sequence: Synthetic oligonucleotide"
  source 1..20: mol_type = other RNA
tataaaactacgataaaatt

SEQ ID NO: 10062 - RNA, 20 nt, synthetic construct
  misc_feature 1..20: note = source = /note="Description of Artificial Sequence: Synthetic oligonucleotide"
  source 1..20: mol_type = other RNA
acttgtataactaatcaaac

SEQ ID NO: 10063 - RNA, 20 nt, synthetic construct
  misc_feature 1..20: note = source = /note="Description of Artificial Sequence: Synthetic oligonucleotide"
  source 1..20: mol_type = other RNA
aacttgtataactaatcaaa

SEQ ID NO: 10064 - RNA, 20 nt, synthetic construct
  misc_feature 1..20: note = source = /note="Description of Artificial Sequence: Synthetic oligonucleotide"
  source 1..20: mol_type = other RNA
taacttgtataactaatcaa

SEQ ID NO: 10065 - RNA, 20 nt, synthetic construct
  misc_feature 1..20: note = source = /note="Description of Artificial Sequence: Synthetic oligonucleotide"
  source 1..20: mol_type = other RNA
aagaaagttttttggacgac

SEQ ID NO: 10066 - RNA, 20 nt, synthetic construct
  misc_feature 1..20: note = source = /note="Description of Artificial Sequence: Synthetic oligonucleotide"
  source 1..20: mol_type = other RNA
taagaaagttttttggacga

SEQ ID NO: 10067 - RNA, 20 nt, synthetic construct
  misc_feature 1..20: note = source = /note="Description of Artificial Sequence: Synthetic oligonucleotide"
  source 1..20: mol_type = other RNA
ttaagaaagttttttggacg

SEQ ID NO: 10068 - RNA, 20 nt, synthetic construct
  misc_feature 1..20: note = source = /note="Description of Artificial Sequence: Synthetic oligonucleotide"
  source 1..20: mol_type = other RNA
tccgcactcggtgacgcgga

SEQ ID NO: 10069 - RNA, 20 nt, synthetic construct
  misc_feature 1..20: note = source = /note="Description of Artificial Sequence: Synthetic oligonucleotide"
  source 1..20: mol_type = other RNA
gtccgcactcggtgacgcgg

SEQ ID NO: 10070 - RNA, 20 nt, synthetic construct
  misc_feature 1..20: note = source = /note="Description of Artificial Sequence: Synthetic oligonucleotide"
  source 1..20: mol_type = other RNA
aggctttcacgaccttaatg

SEQ ID NO: 10071 - RNA, 20 nt, synthetic construct
  misc_feature 1..20: note = source = /note="Description of Artificial Sequence: Synthetic oligonucleotide"
  source 1..20: mol_type = other RNA
tggagccggaggctttcacg

SEQ ID NO: 10072 - RNA, 20 nt, synthetic construct
  misc_feature 1..20: note = source = /note="Description of Artificial Sequence: Synthetic oligonucleotide"
  source 1..20: mol_type = other RNA
gagttcactaggtgggtgga

SEQ ID NO: 10073 - RNA, 20 nt, synthetic construct
  misc_feature 1..20: note = source = /note="Description of Artificial Sequence: Synthetic oligonucleotide"
  source 1..20: mol_type = other RNA
gtccgaccagagttttgagg

SEQ ID NO: 10074 - RNA, 20 nt, synthetic construct
  misc_feature 1..20: note = source = /note="Description of Artificial Sequence: Synthetic oligonucleotide"
  source 1..20: mol_type = other RNA
aaaacggtacaaccggtccg

SEQ ID NO: 10075 - RNA, 20 nt, synthetic construct
  misc_feature 1..20: note = source = /note="Description of Artificial Sequence: Synthetic oligonucleotide"
  source 1..20: mol_type = other RNA
tctcaaaacggtacaaccgg

SEQ ID NO: 10076 - RNA, 20 nt, synthetic construct
  misc_feature 1..20: note = source = /note="Description of Artificial Sequence: Synthetic oligonucleotide"
  source 1..20: mol_type = other RNA
ctctatctcaaaacggtaca

SEQ ID NO: 10077 - RNA, 20 nt, synthetic construct
  misc_feature 1..20: note = source = /note="Description of Artificial Sequence: Synthetic oligonucleotide"
  source 1..20: mol_type = other RNA
ggagttggagggttcgtcga

SEQ ID NO: 10078 - RNA, 20 nt, synthetic construct
  misc_feature 1..20: note = source = /note="Description of Artificial Sequence: Synthetic oligonucleotide"
  source 1..20: mol_type = other RNA
cggagttggagggttcgtcg

SEQ ID NO: 10079 - RNA, 20 nt, synthetic construct
  misc_feature 1..20: note = source = /note="Description of Artificial Sequence: Synthetic oligonucleotide"
  source 1..20: mol_type = other RNA
ggacctaagttcgctaagag

SEQ ID NO: 10080 - RNA, 20 nt, synthetic construct
  misc_feature 1..20: note = source = /note="Description of Artificial Sequence: Synthetic oligonucleotide"
  source 1..20: mol_type = other RNA
agtgacgttggagacggagg

SEQ ID NO: 10081 - RNA, 20 nt, synthetic construct
  misc_feature 1..20: note = source = /note="Description of Artificial Sequence: Synthetic oligonucleotide"
  source 1..20: mol_type = other RNA
cctcacgtcaccgtgctaga

SEQ ID NO: 10082 - RNA, 20 nt, synthetic construct
  misc_feature 1..20: note = source = /note="Description of Artificial Sequence: Synthetic oligonucleotide"
  source 1..20: mol_type = other RNA
acctcacgtcaccgtgctag

SEQ ID NO: 10083 - RNA, 20 nt, synthetic construct
  misc_feature 1..20: note = source = /note="Description of Artificial Sequence: Synthetic oligonucleotide"
  source 1..20: mol_type = other RNA
agtgggtccgacctcacgtc

SEQ ID NO: 10084 - RNA, 20 nt, synthetic construct
  misc_feature 1..20: note = source = /note="Description of Artificial Sequence: Synthetic oligonucleotide"
  source 1..20: mol_type = other RNA
agggtgagacagtgggtccg

SEQ ID NO: 10085 - RNA, 20 nt, synthetic construct
  misc_feature 1..20: note = source = /note="Description of Artificial Sequence: Synthetic oligonucleotide"
  source 1..20: mol_type = other RNA
tctcagggtgagacagtggg

SEQ ID NO: 10086 - RNA, 20 nt, synthetic construct
  misc_feature 1..20: note = source = /note="Description of Artificial Sequence: Synthetic oligonucleotide"
  source 1..20: mol_type = other RNA
cacatattaccacacataca

SEQ ID NO: 10087 - RNA, 20 nt, synthetic construct
  misc_feature 1..20: note = source = /note="Description of Artificial Sequence: Synthetic oligonucleotide"
  source 1..20: mol_type = other RNA
agactaggtgaacacatatt

SEQ ID NO: 10088 - RNA, 20 nt, synthetic construct
  misc_feature 1..20: note = source = /note="Description of Artificial Sequence: Synthetic oligonucleotide"
  source 1..20: mol_type = other RNA
tatatacaacccagatgaat

SEQ ID NO: 10089 - RNA, 20 nt, synthetic construct
  misc_feature 1..20: note = source = /note="Description of Artificial Sequence: Synthetic oligonucleotide"
  source 1..20: mol_type = other RNA
aactggtataatatatacaa

SEQ ID NO: 10090 - RNA, 20 nt, synthetic construct
  misc_feature 1..20: note = source = /note="Description of Artificial Sequence: Synthetic oligonucleotide"
  source 1..20: mol_type = other RNA
taactggtataatatataca

SEQ ID NO: 10091 - RNA, 20 nt, synthetic construct
  misc_feature 1..20: note = source = /note="Description of Artificial Sequence: Synthetic oligonucleotide"
  source 1..20: mol_type = other RNA
agtctatgatgacctatttt

SEQ ID NO: 10092 - RNA, 20 nt, synthetic construct
  misc_feature 1..20: note = source = /note="Description of Artificial Sequence: Synthetic oligonucleotide"
  source 1..20: mol_type = other RNA
aggttgacaagtctatgatg

SEQ ID NO: 10093 - RNA, 20 nt, synthetic construct
  misc_feature 1..20: note = source = /note="Description of Artificial Sequence: Synthetic oligonucleotide"
  source 1..20: mol_type = other RNA
tctaatggaaaaaagggaat

SEQ ID NO: 10094 - RNA, 20 nt, synthetic construct
  misc_feature 1..20: note = source = /note="Description of Artificial Sequence: Synthetic oligonucleotide"
  source 1..20: mol_type = other RNA
atatttaccacactttaatt

SEQ ID NO: 10095 - RNA, 20 nt, synthetic construct
  misc_feature 1..20: note = source = /note="Description of Artificial Sequence: Synthetic oligonucleotide"
  source 1..20: mol_type = other RNA
aatatttaccacactttaat

SEQ ID NO: 10096 - RNA, 20 nt, synthetic construct
  misc_feature 1..20: note = source = /note="Description of Artificial Sequence: Synthetic oligonucleotide"
  source 1..20: mol_type = other RNA
aacctcaattaaaaatattt

SEQ ID NO: 10097 - RNA, 20 nt, synthetic construct
  misc_feature 1..20: note = source = /note="Description of Artificial Sequence: Synthetic oligonucleotide"
  source 1..20: mol_type = other RNA
aagtatatttacctaaataa

SEQ ID NO: 10098 - RNA, 20 nt, synthetic construct
  misc_feature 1..20: note = source = /note="Description of Artificial Sequence: Synthetic oligonucleotide"
  source 1..20: mol_type = other RNA
aaagatcttaaagtatattt

SEQ ID NO: 10099 - RNA, 20 nt, synthetic construct
  misc_feature 1..20: note = source = /note="Description of Artificial Sequence: Synthetic oligonucleotide"
  source 1..20: mol_type = other RNA
tttattttatagtgttattg

SEQ ID NO: 10100 - RNA, 20 nt, synthetic construct
  misc_feature 1..20: note = source = /note="Description of Artificial Sequence: Synthetic oligonucleotide"
  source 1..20: mol_type = other RNA
atagagcaaatatcttgaca

SEQ ID NO: 10101 - RNA, 20 nt, synthetic construct
  misc_feature 1..20: note = source = /note="Description of Artificial Sequence: Synthetic oligonucleotide"
  source 1..20: mol_type = other RNA
atatatatccagaaacaaaa

SEQ ID NO: 10102 - RNA, 20 nt, synthetic construct
  misc_feature 1..20: note = source = /note="Description of Artificial Sequence: Synthetic oligonucleotide"
  source 1..20: mol_type = other RNA
atggcagcacattggtaagt

SEQ ID NO: 10103 - RNA, 20 nt, synthetic construct
  misc_feature 1..20: note = source = /note="Description of Artificial Sequence: Synthetic oligonucleotide"
  source 1..20: mol_type = other RNA
tggcagcacattggtaagtt

SEQ ID NO: 10104 - RNA, 20 nt, synthetic construct
  misc_feature 1..20: note = source = /note="Description of Artificial Sequence: Synthetic oligonucleotide"
  source 1..20: mol_type = other RNA
cacattggtaagttgggctg

SEQ ID NO: 10105 - RNA, 20 nt, synthetic construct
  misc_feature 1..20: note = source = /note="Description of Artificial Sequence: Synthetic oligonucleotide"
  source 1..20: mol_type = other RNA
aataaagacatatgcaagac

SEQ ID NO: 10106 - RNA, 20 nt, synthetic construct
  misc_feature 1..20: note = source = /note="Description of Artificial Sequence: Synthetic oligonucleotide"
  source 1..20: mol_type = other RNA
ataaagacatatgcaagact

SEQ ID NO: 10107 - RNA, 20 nt, synthetic construct
  misc_feature 1..20: note = source = /note="Description of Artificial Sequence: Synthetic oligonucleotide"
  source 1..20: mol_type = other RNA
caagactgggtaatttataa

SEQ ID NO: 10108 - RNA, 20 nt, synthetic construct
  misc_feature 1..20: note = source = /note="Description of Artificial Sequence: Synthetic oligonucleotide"
  source 1..20: mol_type = other RNA
aattgactcacagttccaca

SEQ ID NO: 10109 - RNA, 20 nt, synthetic construct
  misc_feature 1..20: note = source = /note="Description of Artificial Sequence: Synthetic oligonucleotide"
  source 1..20: mol_type = other RNA
ctcacagttccacatggctg

SEQ ID NO: 10110 - RNA, 20 nt, synthetic construct
  misc_feature 1..20: note = source = /note="Description of Artificial Sequence: Synthetic oligonucleotide"
  source 1..20: mol_type = other RNA
acagttccacatggctgtgg

SEQ ID NO: 10111 - RNA, 20 nt, synthetic construct
  misc_feature 1..20: note = source = /note="Description of Artificial Sequence: Synthetic oligonucleotide"
  source 1..20: mol_type = other RNA
ggcctcacaatcatagctga

SEQ ID NO: 10112 - RNA, 20 nt, synthetic construct
  misc_feature 1..20: note = source = /note="Description of Artificial Sequence: Synthetic oligonucleotide"
  source 1..20: mol_type = other RNA
atcatagctgaaggcaaatg

SEQ ID NO: 10113 - RNA, 20 nt, synthetic construct
  misc_feature 1..20: note = source = /note="Description of Artificial Sequence: Synthetic oligonucleotide"
  source 1..20: mol_type = other RNA
gagcaaagtcacatcttaca

SEQ ID NO: 10114 - RNA, 20 nt, synthetic construct
  misc_feature 1..20: note = source = /note="Description of Artificial Sequence: Synthetic oligonucleotide"
  source 1..20: mol_type = other RNA
caaagtcacatcttacatgg

SEQ ID NO: 10115 - RNA, 20 nt, synthetic construct
  misc_feature 1..20: note = source = /note="Description of Artificial Sequence: Synthetic oligonucleotide"
  source 1..20: mol_type = other RNA
gtcacatcttacatggcggc

SEQ ID NO: 10116 - RNA, 20 nt, synthetic construct
  misc_feature 1..20: note = source = /note="Description of Artificial Sequence: Synthetic oligonucleotide"
  source 1..20: mol_type = other RNA
gcaggcaagagaacatgtgc

SEQ ID NO: 10117 - RNA, 20 nt, synthetic construct
  misc_feature 1..20: note = source = /note="Description of Artificial Sequence: Synthetic oligonucleotide"
  source 1..20: mol_type = other RNA
caggcaagagaacatgtgca

SEQ ID NO: 10118 - RNA, 20 nt, synthetic construct
  misc_feature 1..20: note = source = /note="Description of Artificial Sequence: Synthetic oligonucleotide"
  source 1..20: mol_type = other RNA
aggcaagagaacatgtgcag

SEQ ID NO: 10119 - RNA, 20 nt, synthetic construct
  misc_feature 1..20: note = source = /note="Description of Artificial Sequence: Synthetic oligonucleotide"
  source 1..20: mol_type = other RNA
ttactctcctgagaacagca

SEQ ID NO: 10120 - RNA, 20 nt, synthetic construct
  misc_feature 1..20: note = source = /note="Description of Artificial Sequence: Synthetic oligonucleotide"
  source 1..20: mol_type = other RNA
tactctcctgagaacagcat

SEQ ID NO: 10121 - RNA, 20 nt, synthetic construct
  misc_feature 1..20: note = source = /note="Description of Artificial Sequence: Synthetic oligonucleotide"
  source 1..20: mol_type = other RNA
atgattcaattacctcccac

SEQ ID NO: 10122 - RNA, 20 nt, synthetic construct
  misc_feature 1..20: note = source = /note="Description of Artificial Sequence: Synthetic oligonucleotide"
  source 1..20: mol_type = other RNA
tgattcaattacctcccact

SEQ ID NO: 10123 - RNA, 20 nt, synthetic construct
  misc_feature 1..20: note = source = /note="Description of Artificial Sequence: Synthetic oligonucleotide"
  source 1..20: mol_type = other RNA
tgggtccttcccaaaacaca

SEQ ID NO: 10124 - RNA, 20 nt, synthetic construct
  misc_feature 1..20: note = source = /note="Description of Artificial Sequence: Synthetic oligonucleotide"
  source 1..20: mol_type = other RNA
gggtccttcccaaaacacat

SEQ ID NO: 10125 - RNA, 20 nt, synthetic construct
  misc_feature 1..20: note = source = /note="Description of Artificial Sequence: Synthetic oligonucleotide"
  source 1..20: mol_type = other RNA
cccaaaacacatgggaattt

SEQ ID NO: 10126 - RNA, 20 nt, synthetic construct
  misc_feature 1..20: note = source = /note="Description of Artificial Sequence: Synthetic oligonucleotide"
  source 1..20: mol_type = other RNA
ccaaaacacatgggaatttt

SEQ ID NO: 10127 - RNA, 20 nt, synthetic construct
  misc_feature 1..20: note = source = /note="Description of Artificial Sequence: Synthetic oligonucleotide"
  source 1..20: mol_type = other RNA
tacaattcaagatgagattt

SEQ ID NO: 10128 - RNA, 20 nt, synthetic construct
  misc_feature 1..20: note = source = /note="Description of Artificial Sequence: Synthetic oligonucleotide"
  source 1..20: mol_type = other RNA
attcaagatgagatttaggt

SEQ ID NO: 10129 - RNA, 20 nt, synthetic construct
  misc_feature 1..20: note = source = /note="Description of Artificial Sequence: Synthetic oligonucleotide"
  source 1..20: mol_type = other RNA
ttcaagatgagatttaggta

SEQ ID NO: 10130 - RNA, 20 nt, synthetic construct
  misc_feature 1..20: note = source = /note="Description of Artificial Sequence: Synthetic oligonucleotide"
  source 1..20: mol_type = other RNA
atcagcagcatctcatgttg

SEQ ID NO: 10131 - RNA, 20 nt, synthetic construct
  misc_feature 1..20: note = source = /note="Description of Artificial Sequence: Synthetic oligonucleotide"
  source 1..20: mol_type = other RNA
catgttgaggagcagaacac

SEQ ID NO: 10132 - RNA, 20 nt, synthetic construct
  misc_feature 1..20: note = source = /note="Description of Artificial Sequence: Synthetic oligonucleotide"
  source 1..20: mol_type = other RNA
cactggaatttagtagcatt

SEQ ID NO: 10133 - RNA, 20 nt, synthetic construct
  misc_feature 1..20: note = source = /note="Description of Artificial Sequence: Synthetic oligonucleotide"
  source 1..20: mol_type = other RNA
tagagtaatatgttgtctgc

SEQ ID NO: 10134 - RNA, 20 nt, synthetic construct
  misc_feature 1..20: note = source = /note="Description of Artificial Sequence: Synthetic oligonucleotide"
  source 1..20: mol_type = other RNA
atgttgtctgcaggtttcac

SEQ ID NO: 10135 - RNA, 20 nt, synthetic construct
  misc_feature 1..20: note = source = /note="Description of Artificial Sequence: Synthetic oligonucleotide"
  source 1..20: mol_type = other RNA
tgttgcaaagtgacctgctt

SEQ ID NO: 10136 - RNA, 20 nt, synthetic construct
  misc_feature 1..20: note = source = /note="Description of Artificial Sequence: Synthetic oligonucleotide"
  source 1..20: mol_type = other RNA
ataactagcactctcatgat

SEQ ID NO: 10137 - RNA, 20 nt, synthetic construct
  misc_feature 1..20: note = source = /note="Description of Artificial Sequence: Synthetic oligonucleotide"
  source 1..20: mol_type = other RNA
ctagcactctcatgataggt

SEQ ID NO: 10138 - RNA, 20 nt, synthetic construct
  misc_feature 1..20: note = source = /note="Description of Artificial Sequence: Synthetic oligonucleotide"
  source 1..20: mol_type = other RNA
tgacaagcacatgagaatca

SEQ ID NO: 10139 - RNA, 20 nt, synthetic construct
  misc_feature 1..20: note = source = /note="Description of Artificial Sequence: Synthetic oligonucleotide"
  source 1..20: mol_type = other RNA
atgagaatcatggaaatcct

SEQ ID NO: 10140 - RNA, 20 nt, synthetic construct
  misc_feature 1..20: note = source = /note="Description of Artificial Sequence: Synthetic oligonucleotide"
  source 1..20: mol_type = other RNA
gccagttacagttaacttcc

SEQ ID NO: 10141 - RNA, 20 nt, synthetic construct
  misc_feature 1..20: note = source = /note="Description of Artificial Sequence: Synthetic oligonucleotide"
  source 1..20: mol_type = other RNA
aaaattcagtgccagttacc

SEQ ID NO: 10142 - RNA, 20 nt, synthetic construct
  misc_feature 1..20: note = source = /note="Description of Artificial Sequence: Synthetic oligonucleotide"
  source 1..20: mol_type = other RNA
catcattgtcacagtaactg

SEQ ID NO: 10143 - RNA, 20 nt, synthetic construct
  misc_feature 1..20: note = source = /note="Description of Artificial Sequence: Synthetic oligonucleotide"
  source 1..20: mol_type = other RNA
agcctgactacatattacag

SEQ ID NO: 10144 - RNA, 20 nt, synthetic construct
  misc_feature 1..20: note = source = /note="Description of Artificial Sequence: Synthetic oligonucleotide"
  source 1..20: mol_type = other RNA
gcctgactacatattacagt

SEQ ID NO: 10145 - RNA, 20 nt, synthetic construct
  misc_feature 1..20: note = source = /note="Description of Artificial Sequence: Synthetic oligonucleotide"
  source 1..20: mol_type = other RNA
acatattacagtgggtaaaa

SEQ ID NO: 10146 - RNA, 20 nt, synthetic construct
  misc_feature 1..20: note = source = /note="Description of Artificial Sequence: Synthetic oligonucleotide"
  source 1..20: mol_type = other RNA
ttacagtgggtaaaatggat

SEQ ID NO: 10147 - RNA, 20 nt, synthetic construct
  misc_feature 1..20: note = source = /note="Description of Artificial Sequence: Synthetic oligonucleotide"
  source 1..20: mol_type = other RNA
aaatggatcggtcttgtaat

SEQ ID NO: 10148 - RNA, 20 nt, synthetic construct
  misc_feature 1..20: note = source = /note="Description of Artificial Sequence: Synthetic oligonucleotide"
  source 1..20: mol_type = other RNA
tggatcggtcttgtaattgg

SEQ ID NO: 10149 - RNA, 20 nt, synthetic construct
  misc_feature 1..20: note = source = /note="Description of Artificial Sequence: Synthetic oligonucleotide"
  source 1..20: mol_type = other RNA
ggtcttgtaattggaggcag

SEQ ID NO: 10150 - RNA, 20 nt, synthetic construct
  misc_feature 1..20: note = source = /note="Description of Artificial Sequence: Synthetic oligonucleotide"
  source 1..20: mol_type = other RNA
tgtaattggaggcagtggtg

SEQ ID NO: 10151 - RNA, 20 nt, synthetic construct
  misc_feature 1..20: note = source = /note="Description of Artificial Sequence: Synthetic oligonucleotide"
  source 1..20: mol_type = other RNA
gtaattggaggcagtggtga

SEQ ID NO: 10152 - RNA, 20 nt, synthetic construct
  misc_feature 1..20: note = source = /note="Description of Artificial Sequence: Synthetic oligonucleotide"
  source 1..20: mol_type = other RNA
taattggaggcagtggtgag

SEQ ID NO: 10153 - RNA, 20 nt, synthetic construct
  misc_feature 1..20: note = source = /note="Description of Artificial Sequence: Synthetic oligonucleotide"
  source 1..20: mol_type = other RNA
tatatgttctataccaacaa

SEQ ID NO: 10154 - RNA, 20 nt, synthetic construct
  misc_feature 1..20: note = source = /note="Description of Artificial Sequence: Synthetic oligonucleotide"
  source 1..20: mol_type = other RNA
atatgttctataccaacaaa

SEQ ID NO: 10155 - RNA, 20 nt, synthetic construct
  misc_feature 1..20: note = source = /note="Description of Artificial Sequence: Synthetic oligonucleotide"
  source 1..20: mol_type = other RNA
tctataccaacaaagggttc

SEQ ID NO: 10156 - RNA, 20 nt, synthetic construct
  misc_feature 1..20: note = source = /note="Description of Artificial Sequence: Synthetic oligonucleotide"
  source 1..20: mol_type = other RNA
ctataccaacaaagggttca

SEQ ID NO: 10157 - RNA, 20 nt, synthetic construct
  misc_feature 1..20: note = source = /note="Description of Artificial Sequence: Synthetic oligonucleotide"
  source 1..20: mol_type = other RNA
gggtataattttgcatgtaa

SEQ ID NO: 10158 - RNA, 20 nt, synthetic construct
  misc_feature 1..20: note = source = /note="Description of Artificial Sequence: Synthetic oligonucleotide"
  source 1..20: mol_type = other RNA
ggtataattttgcatgtaaa

SEQ ID NO: 10159 - RNA, 20 nt, synthetic construct
  misc_feature 1..20: note = source = /note="Description of Artificial Sequence: Synthetic oligonucleotide"
  source 1..20: mol_type = other RNA
gtataattttgcatgtaaag

SEQ ID NO: 10160 - RNA, 20 nt, synthetic construct
  misc_feature 1..20: note = source = /note="Description of Artificial Sequence: Synthetic oligonucleotide"
  source 1..20: mol_type = other RNA
aacctaatgaattatcaaca

SEQ ID NO: 10161 - RNA, 20 nt, synthetic construct
  misc_feature 1..20: note = source = /note="Description of Artificial Sequence: Synthetic oligonucleotide"
  source 1..20: mol_type = other RNA
tgaattatcaacatggatgt

SEQ ID NO: 10162 - RNA, 20 nt, synthetic construct
  misc_feature 1..20: note = source = /note="Description of Artificial Sequence: Synthetic oligonucleotide"
  source 1..20: mol_type = other RNA
gtaggtgtagttgaagaaga

SEQ ID NO: 10163 - RNA, 20 nt, synthetic construct
  misc_feature 1..20: note = source = /note="Description of Artificial Sequence: Synthetic oligonucleotide"
  source 1..20: mol_type = other RNA
gaagatggtcagtgagaata

SEQ ID NO: 10164 - RNA, 20 nt, synthetic construct
  misc_feature 1..20: note = source = /note="Description of Artificial Sequence: Synthetic oligonucleotide"
  source 1..20: mol_type = other RNA
agaatatggaaacagatatc

SEQ ID NO: 10165 - RNA, 20 nt, synthetic construct
  misc_feature 1..20: note = source = /note="Description of Artificial Sequence: Synthetic oligonucleotide"
  source 1..20: mol_type = other RNA
aggaattaaagtcatattct

SEQ ID NO: 10166 - RNA, 20 nt, synthetic construct
  misc_feature 1..20: note = source = /note="Description of Artificial Sequence: Synthetic oligonucleotide"
  source 1..20: mol_type = other RNA
ggaattaaagtcatattcta

SEQ ID NO: 10167 - RNA, 20 nt, synthetic construct
  misc_feature 1..20: note = source = /note="Description of Artificial Sequence: Synthetic oligonucleotide"
  source 1..20: mol_type = other RNA
ctagggcagaaaagcattca

SEQ ID NO: 10168 - RNA, 20 nt, synthetic construct
  misc_feature 1..20: note = source = /note="Description of Artificial Sequence: Synthetic oligonucleotide"
  source 1..20: mol_type = other RNA
gggcagaaaagcattcatgg

SEQ ID NO: 10169 - RNA, 20 nt, synthetic construct
  misc_feature 1..20: note = source = /note="Description of Artificial Sequence: Synthetic oligonucleotide"
  source 1..20: mol_type = other RNA
ctgaagtaatttgaagaagc

SEQ ID NO: 10170 - RNA, 20 nt, synthetic construct
  misc_feature 1..20: note = source = /note="Description of Artificial Sequence: Synthetic oligonucleotide"
  source 1..20: mol_type = other RNA
taatgttctagatcagagat

SEQ ID NO: 10171 - RNA, 20 nt, synthetic construct
  misc_feature 1..20: note = source = /note="Description of Artificial Sequence: Synthetic oligonucleotide"
  source 1..20: mol_type = other RNA
tggaaaactcttctctataa

SEQ ID NO: 10172 - RNA, 20 nt, synthetic construct
  misc_feature 1..20: note = source = /note="Description of Artificial Sequence: Synthetic oligonucleotide"
  source 1..20: mol_type = other RNA
ggaaaactcttctctataaa

SEQ ID NO: 10173 - RNA, 20 nt, synthetic construct
  misc_feature 1..20: note = source = /note="Description of Artificial Sequence: Synthetic oligonucleotide"
  source 1..20: mol_type = other RNA
cttctctataaagggcaaga

SEQ ID NO: 10174 - RNA, 20 nt, synthetic construct
  misc_feature 1..20: note = source = /note="Description of Artificial Sequence: Synthetic oligonucleotide"
  source 1..20: mol_type = other RNA
ggcaagatggtaaatatttt

SEQ ID NO: 10175 - RNA, 20 nt, synthetic construct
  misc_feature 1..20: note = source = /note="Description of Artificial Sequence: Synthetic oligonucleotide"
  source 1..20: mol_type = other RNA
gcaagatggtaaatatttta

SEQ ID NO: 10176 - RNA, 20 nt, synthetic construct
  misc_feature 1..20: note = source = /note="Description of Artificial Sequence: Synthetic oligonucleotide"
  source 1..20: mol_type = other RNA
gtaaatattttagggactgc

SEQ ID NO: 10177 - RNA, 20 nt, synthetic construct
  misc_feature 1..20: note = source = /note="Description of Artificial Sequence: Synthetic oligonucleotide"
  source 1..20: mol_type = other RNA
ttagggactgcaggccacat

SEQ ID NO: 10178 - RNA, 20 nt, synthetic construct
  misc_feature 1..20: note = source = /note="Description of Artificial Sequence: Synthetic oligonucleotide"
  source 1..20: mol_type = other RNA
aggatttctgtcacattgtt

SEQ ID NO: 10179 - RNA, 20 nt, synthetic construct
  misc_feature 1..20: note = source = /note="Description of Artificial Sequence: Synthetic oligonucleotide"
  source 1..20: mol_type = other RNA
atttctgtcacattgtttgg

SEQ ID NO: 10180 - RNA, 20 nt, synthetic construct
  misc_feature 1..20: note = source = /note="Description of Artificial Sequence: Synthetic oligonucleotide"
  source 1..20: mol_type = other RNA
tttctgtcacattgtttggt

SEQ ID NO: 10181 - RNA, 20 nt, synthetic construct
  misc_feature 1..20: note = source = /note="Description of Artificial Sequence: Synthetic oligonucleotide"
  source 1..20: mol_type = other RNA
ttctgtcacattgtttggtg

SEQ ID NO: 10182 - RNA, 20 nt, synthetic construct
  misc_feature 1..20: note = source = /note="Description of Artificial Sequence: Synthetic oligonucleotide"
  source 1..20: mol_type = other RNA
aaaaaccattcttagtttac

SEQ ID NO: 10183 - RNA, 20 nt, synthetic construct
  misc_feature 1..20: note = source = /note="Description of Artificial Sequence: Synthetic oligonucleotide"
  source 1..20: mol_type = other RNA
ccatacaaacacaagctgtg

SEQ ID NO: 10184 - RNA, 20 nt, synthetic construct
  misc_feature 1..20: note = source = /note="Description of Artificial Sequence: Synthetic oligonucleotide"
  source 1..20: mol_type = other RNA
ctgtgaggcacattagccgt

SEQ ID NO: 10185 - RNA, 20 nt, synthetic construct
  misc_feature 1..20: note = source = /note="Description of Artificial Sequence: Synthetic oligonucleotide"
  source 1..20: mol_type = other RNA
ggcacattagccgtaggttc

SEQ ID NO: 10186 - RNA, 20 nt, synthetic construct
  misc_feature 1..20: note = source = /note="Description of Artificial Sequence: Synthetic oligonucleotide"
  source 1..20: mol_type = other RNA
gatccagaagaacaaacaca

SEQ ID NO: 10187 - RNA, 20 nt, synthetic construct
  misc_feature 1..20: note = source = /note="Description of Artificial Sequence: Synthetic oligonucleotide"
  source 1..20: mol_type = other RNA
ctcagcacctgctcattatt

SEQ ID NO: 10188 - RNA, 20 nt, synthetic construct
  misc_feature 1..20: note = source = /note="Description of Artificial Sequence: Synthetic oligonucleotide"
  source 1..20: mol_type = other RNA
agcacctgctcattattagg

SEQ ID NO: 10189 - RNA, 20 nt, synthetic construct
  misc_feature 1..20: note = source = /note="Description of Artificial Sequence: Synthetic oligonucleotide"
  source 1..20: mol_type = other RNA
cagaagtagtaaatgataac

SEQ ID NO: 10190 - RNA, 20 nt, synthetic construct
  misc_feature 1..20: note = source = /note="Description of Artificial Sequence: Synthetic oligonucleotide"
  source 1..20: mol_type = other RNA
agaagtagtaaatgataact

SEQ ID NO: 10191 - RNA, 20 nt, synthetic construct
  misc_feature 1..20: note = source = /note="Description of Artificial Sequence: Synthetic oligonucleotide"
  source 1..20: mol_type = other RNA
gaagtagtaaatgataactg

SEQ ID NO: 10192 - RNA, 20 nt, synthetic construct
  misc_feature 1..20: note = source = /note="Description of Artificial Sequence: Synthetic oligonucleotide"
  source 1..20: mol_type = other RNA
atataaccatgtttcattcc

SEQ ID NO: 10193 - RNA, 20 nt, synthetic construct
  misc_feature 1..20: note = source = /note="Description of Artificial Sequence: Synthetic oligonucleotide"
  source 1..20: mol_type = other RNA
aaccatgtttcattccagga

SEQ ID NO: 10194 - RNA, 20 nt, synthetic construct
  misc_feature 1..20: note = source = /note="Description of Artificial Sequence: Synthetic oligonucleotide"
  source 1..20: mol_type = other RNA
cagagagtaagatgatgaga

SEQ ID NO: 10195 - RNA, 20 nt, synthetic construct
  misc_feature 1..20: note = source = /note="Description of Artificial Sequence: Synthetic oligonucleotide"
  source 1..20: mol_type = other RNA
aatttgcctctgatagagca

SEQ ID NO: 10196 - RNA, 20 nt, synthetic construct
  misc_feature 1..20: note = source = /note="Description of Artificial Sequence: Synthetic oligonucleotide"
  source 1..20: mol_type = other RNA
atttgcctctgatagagcat

SEQ ID NO: 10197 - RNA, 20 nt, synthetic construct
  misc_feature 1..20: note = source = /note="Description of Artificial Sequence: Synthetic oligonucleotide"
  source 1..20: mol_type = other RNA
atgggttctgtgaagtaaaa

SEQ ID NO: 10198 - RNA, 20 nt, synthetic construct
  misc_feature 1..20: note = source = /note="Description of Artificial Sequence: Synthetic oligonucleotide"
  source 1..20: mol_type = other RNA
ttctgtgaagtaaaatggaa

SEQ ID NO: 10199 - RNA, 20 nt, synthetic construct
  misc_feature 1..20: note = source = /note="Description of Artificial Sequence: Synthetic oligonucleotide"
  source 1..20: mol_type = other RNA
gcactagataagaactgaat

SEQ ID NO: 10200 - RNA, 20 nt, synthetic construct
  misc_feature 1..20: note = source = /note="Description of Artificial Sequence: Synthetic oligonucleotide"
  source 1..20: mol_type = other RNA
cactagataagaactgaata

SEQ ID NO: 10201 - RNA, 20 nt, synthetic construct
  misc_feature 1..20: note = source = /note="Description of Artificial Sequence: Synthetic oligonucleotide"
  source 1..20: mol_type = other RNA
tgaatagggttaaatatgta

SEQ ID NO: 10202 - RNA, 20 nt, synthetic construct
  misc_feature 1..20: note = source = /note="Description of Artificial Sequence: Synthetic oligonucleotide"
  source 1..20: mol_type = other RNA
gaatagggttaaatatgtat

SEQ ID NO: 10203 - RNA, 20 nt, synthetic construct
  misc_feature 1..20: note = source = /note="Description of Artificial Sequence: Synthetic oligonucleotide"
  source 1..20: mol_type = other RNA
tatgtatgggaaaagtaaca

SEQ ID NO: 10204 - RNA, 20 nt, synthetic construct
  misc_feature 1..20: note = source = /note="Description of Artificial Sequence: Synthetic oligonucleotide"
  source 1..20: mol_type = other RNA
acttctgtgcagaaagtgac

SEQ ID NO: 10205 - RNA, 20 nt, synthetic construct
  misc_feature 1..20: note = source = /note="Description of Artificial Sequence: Synthetic oligonucleotide"
  source 1..20: mol_type = other RNA
tttaattatcaaagcaacag

SEQ ID NO: 10206 - RNA, 20 nt, synthetic construct
  misc_feature 1..20: note = source = /note="Description of Artificial Sequence: Synthetic oligonucleotide"
  source 1..20: mol_type = other RNA
tttcagagtacccacttata

SEQ ID NO: 10207 - RNA, 20 nt, synthetic construct
  misc_feature 1..20: note = source = /note="Description of Artificial Sequence: Synthetic oligonucleotide"
  source 1..20: mol_type = other RNA
aatgaagaaaagagaaagtt

SEQ ID NO: 10208 - RNA, 20 nt, synthetic construct
  misc_feature 1..20: note = source = /note="Description of Artificial Sequence: Synthetic oligonucleotide"
  source 1..20: mol_type = other RNA
ttaggtttgacagagtacaa

SEQ ID NO: 10209 - RNA, 20 nt, synthetic construct
  misc_feature 1..20: note = source = /note="Description of Artificial Sequence: Synthetic oligonucleotide"
  source 1..20: mol_type = other RNA
ggtttgacagagtacaaagg

SEQ ID NO: 10210 - RNA, 20 nt, synthetic construct
  misc_feature 1..20: note = source = /note="Description of Artificial Sequence: Synthetic oligonucleotide"
  source 1..20: mol_type = other RNA
tttttacttcagttatctta

SEQ ID NO: 10211 - RNA, 20 nt, synthetic construct
  misc_feature 1..20: note = source = /note="Description of Artificial Sequence: Synthetic oligonucleotide"
  source 1..20: mol_type = other RNA
tttcttaaacagagagagtt

SEQ ID NO: 10212 - RNA, 20 nt, synthetic construct
  misc_feature 1..20: note = source = /note="Description of Artificial Sequence: Synthetic oligonucleotide"
  source 1..20: mol_type = other RNA
aacagagagagttaggtgtc

SEQ ID NO: 10213 - RNA, 20 nt, synthetic construct
  misc_feature 1..20: note = source = /note="Description of Artificial Sequence: Synthetic oligonucleotide"
  source 1..20: mol_type = other RNA
gtgttcagaagtatgagatg

SEQ ID NO: 10214 - RNA, 20 nt, synthetic construct
  misc_feature 1..20: note = source = /note="Description of Artificial Sequence: Synthetic oligonucleotide"
  source 1..20: mol_type = other RNA
tgtgatactaccaaaaacag

SEQ ID NO: 10215 - RNA, 20 nt, synthetic construct
  misc_feature 1..20: note = source = /note="Description of Artificial Sequence: Synthetic oligonucleotide"
  source 1..20: mol_type = other RNA
cttttagcctgtttttgaag

SEQ ID NO: 10216 - RNA, 20 nt, synthetic construct
  misc_feature 1..20: note = source = /note="Description of Artificial Sequence: Synthetic oligonucleotide"
  source 1..20: mol_type = other RNA
agcaagagagtgcttcattt

SEQ ID NO: 10217 - RNA, 20 nt, synthetic construct
  misc_feature 1..20: note = source = /note="Description of Artificial Sequence: Synthetic oligonucleotide"
  source 1..20: mol_type = other RNA
gcaagagagtgcttcatttt

SEQ ID NO: 10218 - RNA, 20 nt, synthetic construct
  misc_feature 1..20: note = source = /note="Description of Artificial Sequence: Synthetic oligonucleotide"
  source 1..20: mol_type = other RNA
caagagagtgcttcattttg

SEQ ID NO: 10219 - RNA, 20 nt, synthetic construct
  misc_feature 1..20: note = source = /note="Description of Artificial Sequence: Synthetic oligonucleotide"
  source 1..20: mol_type = other RNA
aagagagtgcttcattttgg

SEQ ID NO: 10220 - RNA, 20 nt, synthetic construct
  misc_feature 1..20: note = source = /note="Description of Artificial Sequence: Synthetic oligonucleotide"
  source 1..20: mol_type = other RNA
agaaacatatgtgaagaaca

SEQ ID NO: 10221 - RNA, 20 nt, synthetic construct
  misc_feature 1..20: note = source = /note="Description of Artificial Sequence: Synthetic oligonucleotide"
  source 1..20: mol_type = other RNA
gaaacatatgtgaagaacaa

SEQ ID NO: 10222 - RNA, 20 nt, synthetic construct
  misc_feature 1..20: note = source = /note="Description of Artificial Sequence: Synthetic oligonucleotide"
  source 1..20: mol_type = other RNA
ttcctgatagactcagagaa

SEQ ID NO: 10223 - RNA, 20 nt, synthetic construct
  misc_feature 1..20: note = source = /note="Description of Artificial Sequence: Synthetic oligonucleotide"
  source 1..20: mol_type = other RNA
tcctgatagactcagagaaa

SEQ ID NO: 10224 - RNA, 20 nt, synthetic construct
  misc_feature 1..20: note = source = /note="Description of Artificial Sequence: Synthetic oligonucleotide"
  source 1..20: mol_type = other RNA
tgatagactcagagaaaggg

SEQ ID NO: 10225 - RNA, 20 nt, synthetic construct
  misc_feature 1..20: note = source = /note="Description of Artificial Sequence: Synthetic oligonucleotide"
  source 1..20: mol_type = other RNA
gatagactcagagaaagggt

SEQ ID NO: 10226 - RNA, 20 nt, synthetic construct
  misc_feature 1..20: note = source = /note="Description of Artificial Sequence: Synthetic oligonucleotide"
  source 1..20: mol_type = other RNA
agactcagagaaagggtggg

SEQ ID NO: 10227 - RNA, 20 nt, synthetic construct
  misc_feature 1..20: note = source = /note="Description of Artificial Sequence: Synthetic oligonucleotide"
  source 1..20: mol_type = other RNA
gactcagagaaagggtgggt

SEQ ID NO: 10228 - RNA, 20 nt, synthetic construct
  misc_feature 1..20: note = source = /note="Description of Artificial Sequence: Synthetic oligonucleotide"
  source 1..20: mol_type = other RNA
ttgctattttcattaataac

SEQ ID NO: 10229 - RNA, 20 nt, synthetic construct
  misc_feature 1..20: note = source = /note="Description of Artificial Sequence: Synthetic oligonucleotide"
  source 1..20: mol_type = other RNA
tattttcattaataacaggt

SEQ ID NO: 10230 - RNA, 20 nt, synthetic construct
  misc_feature 1..20: note = source = /note="Description of Artificial Sequence: Synthetic oligonucleotide"
  source 1..20: mol_type = other RNA
ttcattaataacaggtagga

SEQ ID NO: 10231 - RNA, 20 nt, synthetic construct
  misc_feature 1..20: note = source = /note="Description of Artificial Sequence: Synthetic oligonucleotide"
  source 1..20: mol_type = other RNA
taacaggtaggatggtttta

SEQ ID NO: 10232 - RNA, 20 nt, synthetic construct
  misc_feature 1..20: note = source = /note="Description of Artificial Sequence: Synthetic oligonucleotide"
  source 1..20: mol_type = other RNA
taatatatatgtcactgatc

SEQ ID NO: 10233 - RNA, 20 nt, synthetic construct
  misc_feature 1..20: note = source = /note="Description of Artificial Sequence: Synthetic oligonucleotide"
  source 1..20: mol_type = other RNA
gtcactgatctggatcaact

SEQ ID NO: 10234 - RNA, 20 nt, synthetic construct
  misc_feature 1..20: note = source = /note="Description of Artificial Sequence: Synthetic oligonucleotide"
  source 1..20: mol_type = other RNA
acacaaatctgaatactgag

SEQ ID NO: 10235 - RNA, 20 nt, synthetic construct
  misc_feature 1..20: note = source = /note="Description of Artificial Sequence: Synthetic oligonucleotide"
  source 1..20: mol_type = other RNA
acacacacacacgttttctt

SEQ ID NO: 10236 - RNA, 20 nt, synthetic construct
  misc_feature 1..20: note = source = /note="Description of Artificial Sequence: Synthetic oligonucleotide"
  source 1..20: mol_type = other RNA
cacacacacacgttttcttt

SEQ ID NO: 10237 - RNA, 20 nt, synthetic construct
  misc_feature 1..20: note = source = /note="Description of Artificial Sequence: Synthetic oligonucleotide"
  source 1..20: mol_type = other RNA
ttctttgggacctgtagttg

SEQ ID NO: 10238 - RNA, 20 nt, synthetic construct
  misc_feature 1..20: note = source = /note="Description of Artificial Sequence: Synthetic oligonucleotide"
  source 1..20: mol_type = other RNA
cactccggaggtgtcggtac

SEQ ID NO: 10239 - RNA, 20 nt, synthetic construct
  misc_feature 1..20: note = source = /note="Description of Artificial Sequence: Synthetic oligonucleotide"
  source 1..20: mol_type = other RNA
acggaagtcgatactaacac

SEQ ID NO: 10240 - RNA, 20 nt, synthetic construct
  misc_feature 1..20: note = source = /note="Description of Artificial Sequence: Synthetic oligonucleotide"
  source 1..20: mol_type = other RNA
ctagactactaaaatatttc

SEQ ID NO: 10241 - RNA, 20 nt, synthetic construct
  misc_feature 1..20: note = source = /note="Description of Artificial Sequence: Synthetic oligonucleotide"
  source 1..20: mol_type = other RNA
tctagactactaaaatattt

SEQ ID NO: 10242 - RNA, 20 nt, synthetic construct
  misc_feature 1..20: note = source = /note="Description of Artificial Sequence: Synthetic oligonucleotide"
  source 1..20: mol_type = other RNA
ctctagactactaaaatatt

SEQ ID NO: 10243 - RNA, 20 nt, synthetic construct
  misc_feature 1..20: note = source = /note="Description of Artificial Sequence: Synthetic oligonucleotide"
  source 1..20: mol_type = other RNA
tagaaagggtacgacaagag

SEQ ID NO: 10244 - RNA, 20 nt, synthetic construct
  misc_feature 1..20: note = source = /note="Description of Artificial Sequence: Synthetic oligonucleotide"
  source 1..20: mol_type = other RNA
ccctccattaacttagtacc

SEQ ID NO: 10245 - RNA, 20 nt, synthetic construct
  misc_feature 1..20: note = source = /note="Description of Artificial Sequence: Synthetic oligonucleotide"
  source 1..20: mol_type = other RNA
accctccattaacttagtac

SEQ ID NO: 10246 - RNA, 20 nt, synthetic construct
  misc_feature 1..20: note = source = /note="Description of Artificial Sequence: Synthetic oligonucleotide"
  source 1..20: mol_type = other RNA
caccctccattaacttagta

SEQ ID NO: 10247 - RNA, 20 nt, synthetic construct
  misc_feature 1..20: note = source = /note="Description of Artificial Sequence: Synthetic oligonucleotide"
  source 1..20: mol_type = other RNA
tcaccctccattaacttagt

SEQ ID NO: 10248 - RNA, 20 nt, synthetic construct
  misc_feature 1..20: note = source = /note="Description of Artificial Sequence: Synthetic oligonucleotide"
  source 1..20: mol_type = other RNA
aaacccttcctgggtcaccc

SEQ ID NO: 10249 - RNA, 20 nt, synthetic construct
  misc_feature 1..20: note = source = /note="Description of Artificial Sequence: Synthetic oligonucleotide"
  source 1..20: mol_type = other RNA
acaaaacccttcctgggtca

SEQ ID NO: 10250 - RNA, 20 nt, synthetic construct
  misc_feature 1..20: note = source = /note="Description of Artificial Sequence: Synthetic oligonucleotide"
  source 1..20: mol_type = other RNA
cacaaaacccttcctgggtc

SEQ ID NO: 10251 - RNA, 20 nt, synthetic construct
  misc_feature 1..20: note = source = /note="Description of Artificial Sequence: Synthetic oligonucleotide"
  source 1..20: mol_type = other RNA
ttaagggtacacaaaaccct

SEQ ID NO: 10252 - RNA, 20 nt, synthetic construct
  misc_feature 1..20: note = source = /note="Description of Artificial Sequence: Synthetic oligonucleotide"
  source 1..20: mol_type = other RNA
ggttttaagggtacacaaaa

SEQ ID NO: 10253 - RNA, 20 nt, synthetic construct
  misc_feature 1..20: note = source = /note="Description of Artificial Sequence: Synthetic oligonucleotide"
  source 1..20: mol_type = other RNA
gggttttaagggtacacaaa

SEQ ID NO: 10254 - RNA, 20 nt, synthetic construct
  misc_feature 1..20: note = source = /note="Description of Artificial Sequence: Synthetic oligonucleotide"
  source 1..20: mol_type = other RNA
gagatgctgcactataccag

SEQ ID NO: 10255 - RNA, 20 nt, synthetic construct
  misc_feature 1..20: note = source = /note="Description of Artificial Sequence: Synthetic oligonucleotide"
  source 1..20: mol_type = other RNA
aacatgagatgctgcactat

SEQ ID NO: 10256 - RNA, 20 nt, synthetic construct
  misc_feature 1..20: note = source = /note="Description of Artificial Sequence: Synthetic oligonucleotide"
  source 1..20: mol_type = other RNA
aaagcaggtcactttgcaac

SEQ ID NO: 10257 - RNA, 20 nt, synthetic construct
  misc_feature 1..20: note = source = /note="Description of Artificial Sequence: Synthetic oligonucleotide"
  source 1..20: mol_type = other RNA
agtgctagttatgccaaagc

SEQ ID NO: 10258 - RNA, 20 nt, synthetic construct
  misc_feature 1..20: note = source = /note="Description of Artificial Sequence: Synthetic oligonucleotide"
  source 1..20: mol_type = other RNA
tgcttgtcaacacaattgac

SEQ ID NO: 10259 - RNA, 20 nt, synthetic construct
  misc_feature 1..20: note = source = /note="Description of Artificial Sequence: Synthetic oligonucleotide"
  source 1..20: mol_type = other RNA
actggtttagattaacacca

SEQ ID NO: 10260 - RNA, 20 nt, synthetic construct
  misc_feature 1..20: note = source = /note="Description of Artificial Sequence: Synthetic oligonucleotide"
  source 1..20: mol_type = other RNA
aactggcaatgcatagtcac

SEQ ID NO: 10261 - RNA, 20 nt, synthetic construct
  misc_feature 1..20: note = source = /note="Description of Artificial Sequence: Synthetic oligonucleotide"
  source 1..20: mol_type = other RNA
tcctggaagttaactgtaac

SEQ ID NO: 10262 - RNA, 20 nt, synthetic construct
  misc_feature 1..20: note = source = /note="Description of Artificial Sequence: Synthetic oligonucleotide"
  source 1..20: mol_type = other RNA
actgaattttgagattttcc

SEQ ID NO: 10263 - RNA, 20 nt, synthetic construct
  misc_feature 1..20: note = source = /note="Description of Artificial Sequence: Synthetic oligonucleotide"
  source 1..20: mol_type = other RNA
attacaatctaccaggtaac

SEQ ID NO: 10264 - RNA, 20 nt, synthetic construct
  misc_feature 1..20: note = source = /note="Description of Artificial Sequence: Synthetic oligonucleotide"
  source 1..20: mol_type = other RNA
ttaactgattacaatctacc

SEQ ID NO: 10265 - RNA, 20 nt, synthetic construct
  misc_feature 1..20: note = source = /note="Description of Artificial Sequence: Synthetic oligonucleotide"
  source 1..20: mol_type = other RNA
taaggtgaatggcttgtatt

SEQ ID NO: 10266 - RNA, 20 nt, synthetic construct
  misc_feature 1..20: note = source = /note="Description of Artificial Sequence: Synthetic oligonucleotide"
  source 1..20: mol_type = other RNA
ttctctctctgtaaggtgaa

SEQ ID NO: 10267 - RNA, 20 nt, synthetic construct
  misc_feature 1..20: note = source = /note="Description of Artificial Sequence: Synthetic oligonucleotide"
  source 1..20: mol_type = other RNA
aatatgcttctctctctgta

SEQ ID NO: 10268 - RNA, 20 nt, synthetic construct
  misc_feature 1..20: note = source = /note="Description of Artificial Sequence: Synthetic oligonucleotide"
  source 1..20: mol_type = other RNA
tttatgcttctctctctgta

SEQ ID NO: 10269 - RNA, 20 nt, synthetic construct
  misc_feature 1..20: note = source = /note="Description of Artificial Sequence: Synthetic oligonucleotide"
  source 1..20: mol_type = other RNA
cactgtgaatcttttacaat

SEQ ID NO: 10270 - RNA, 20 nt, synthetic construct
  misc_feature 1..20: note = source = /note="Description of Artificial Sequence: Synthetic oligonucleotide"
  source 1..20: mol_type = other RNA
acccactgtaatatgtagtc

SEQ ID NO: 10271 - RNA, 20 nt, synthetic construct
  misc_feature 1..20: note = source = /note="Description of Artificial Sequence: Synthetic oligonucleotide"
  source 1..20: mol_type = other RNA
ttataccctgaaccctttgt

SEQ ID NO: 10272 - RNA, 20 nt, synthetic construct
  misc_feature 1..20: note = source = /note="Description of Artificial Sequence: Synthetic oligonucleotide"
  source 1..20: mol_type = other RNA
ttgttctttatctctactct

SEQ ID NO: 10273 - RNA, 20 nt, synthetic construct
  misc_feature 1..20: note = source = /note="Description of Artificial Sequence: Synthetic oligonucleotide"
  source 1..20: mol_type = other RNA
tttgttctttatctctactc

SEQ ID NO: 10274 - RNA, 20 nt, synthetic construct
  misc_feature 1..20: note = source = /note="Description of Artificial Sequence: Synthetic oligonucleotide"
  source 1..20: mol_type = other RNA
atccatgttgataattcatt

SEQ ID NO: 10275 - RNA, 20 nt, synthetic construct
  misc_feature 1..20: note = source = /note="Description of Artificial Sequence: Synthetic oligonucleotide"
  source 1..20: mol_type = other RNA
ttacactgtctttaggatac

SEQ ID NO: 10276 - RNA, 20 nt, synthetic construct
  misc_feature 1..20: note = source = /note="Description of Artificial Sequence: Synthetic oligonucleotide"
  source 1..20: mol_type = other RNA
cttaccaaaaatgtaaaagt

SEQ ID NO: 10277 - RNA, 20 nt, synthetic construct
  misc_feature 1..20: note = source = /note="Description of Artificial Sequence: Synthetic oligonucleotide"
  source 1..20: mol_type = other RNA
ataccggtcatttgattctt

SEQ ID NO: 10278 - RNA, 20 nt, synthetic construct
  misc_feature 1..20: note = source = /note="Description of Artificial Sequence: Synthetic oligonucleotide"
  source 1..20: mol_type = other RNA
ggagtgtcgaacacaaacat

SEQ ID NO: 10279 - RNA, 20 nt, synthetic construct
  misc_feature 1..20: note = source = /note="Description of Artificial Sequence: Synthetic oligonucleotide"
  source 1..20: mol_type = other RNA
tcaatcctttggtcttggat

SEQ ID NO: 10280 - RNA, 20 nt, synthetic construct
  misc_feature 1..20: note = source = /note="Description of Artificial Sequence: Synthetic oligonucleotide"
  source 1..20: mol_type = other RNA
gttcttctggatgtcttcaa

SEQ ID NO: 10281 - RNA, 20 nt, synthetic construct
  misc_feature 1..20: note = source = /note="Description of Artificial Sequence: Synthetic oligonucleotide"
  source 1..20: mol_type = other RNA
aggccttgtgtttgttcttc

SEQ ID NO: 10282 - RNA, 20 nt, synthetic construct
  misc_feature 1..20: note = source = /note="Description of Artificial Sequence: Synthetic oligonucleotide"
  source 1..20: mol_type = other RNA
tagatgttggggtggttggt

SEQ ID NO: 10283 - RNA, 20 nt, synthetic construct
  misc_feature 1..20: note = source = /note="Description of Artificial Sequence: Synthetic oligonucleotide"
  source 1..20: mol_type = other RNA
attttagatgttggggtggt

SEQ ID NO: 10284 - RNA, 20 nt, synthetic construct
  misc_feature 1..20: note = source = /note="Description of Artificial Sequence: Synthetic oligonucleotide"
  source 1..20: mol_type = other RNA
gatgattttagatgttgggg

SEQ ID NO: 10285 - RNA, 20 nt, synthetic construct
  misc_feature 1..20: note = source = /note="Description of Artificial Sequence: Synthetic oligonucleotide"
  source 1..20: mol_type = other RNA
agtgatgattttagatgttg

SEQ ID NO: 10286 - RNA, 20 nt, synthetic construct
  misc_feature 1..20: note = source = /note="Description of Artificial Sequence: Synthetic oligonucleotide"
  source 1..20: mol_type = other RNA
tagtgatgattttagatgtt

SEQ ID NO: 10287 - RNA, 20 nt, synthetic construct
  misc_feature 1..20: note = source = /note="Description of Artificial Sequence: Synthetic oligonucleotide"
  source 1..20: mol_type = other RNA
ttagtgatgattttagatgt

SEQ ID NO: 10288 - RNA, 20 nt, synthetic construct
  misc_feature 1..20: note = source = /note="Description of Artificial Sequence: Synthetic oligonucleotide"
  source 1..20: mol_type = other RNA
atagcctcctaataatgagc

SEQ ID NO: 10289 - RNA, 20 nt, synthetic construct
  misc_feature 1..20: note = source = /note="Description of Artificial Sequence: Synthetic oligonucleotide"
  source 1..20: mol_type = other RNA
gaatgaaacatggttatatt

SEQ ID NO: 10290 - RNA, 20 nt, synthetic construct
  misc_feature 1..20: note = source = /note="Description of Artificial Sequence: Synthetic oligonucleotide"
  source 1..20: mol_type = other RNA
caccttcctggaatgaaaca

SEQ ID NO: 10291 - RNA, 20 nt, synthetic construct
  misc_feature 1..20: note = source = /note="Description of Artificial Sequence: Synthetic oligonucleotide"
  source 1..20: mol_type = other RNA
cttactctctgtcaccttcc

SEQ ID NO: 10292 - RNA, 20 nt, synthetic construct
  misc_feature 1..20: note = source = /note="Description of Artificial Sequence: Synthetic oligonucleotide"
  source 1..20: mol_type = other RNA
cagaacccatgctctatcag

SEQ ID NO: 10293 - RNA, 20 nt, synthetic construct
  misc_feature 1..20: note = source = /note="Description of Artificial Sequence: Synthetic oligonucleotide"
  source 1..20: mol_type = other RNA
gaaataacttcaacatgaga

SEQ ID NO: 10294 - RNA, 20 nt, synthetic construct
  misc_feature 1..20: note = source = /note="Description of Artificial Sequence: Synthetic oligonucleotide"
  source 1..20: mol_type = other RNA
tgagagaaatgtgatcacaa

SEQ ID NO: 10295 - RNA, 20 nt, synthetic construct
  misc_feature 1..20: note = source = /note="Description of Artificial Sequence: Synthetic oligonucleotide"
  source 1..20: mol_type = other RNA
tatttagtgtttttgatcaa

SEQ ID NO: 10296 - RNA, 20 nt, synthetic construct
  misc_feature 1..20: note = source = /note="Description of Artificial Sequence: Synthetic oligonucleotide"
  source 1..20: mol_type = other RNA
ctttggtaaaagattatttg

SEQ ID NO: 10297 - RNA, 20 nt, synthetic construct
  misc_feature 1..20: note = source = /note="Description of Artificial Sequence: Synthetic oligonucleotide"
  source 1..20: mol_type = other RNA
tactacaattacactagctt

SEQ ID NO: 10298 - RNA, 20 nt, synthetic construct
  misc_feature 1..20: note = source = /note="Description of Artificial Sequence: Synthetic oligonucleotide"
  source 1..20: mol_type = other RNA
ctgttgctttgataattaaa

SEQ ID NO: 10299 - RNA, 20 nt, synthetic construct
  misc_feature 1..20: note = source = /note="Description of Artificial Sequence: Synthetic oligonucleotide"
  source 1..20: mol_type = other RNA
aaagggtaaggggtggaggg

SEQ ID NO: 10300 - RNA, 20 nt, synthetic construct
  misc_feature 1..20: note = source = /note="Description of Artificial Sequence: Synthetic oligonucleotide"
  source 1..20: mol_type = other RNA
tgaaaagggtaaggggtgga

SEQ ID NO: 10301 - RNA, 20 nt, synthetic construct
  misc_feature 1..20: note = source = /note="Description of Artificial Sequence: Synthetic oligonucleotide"
  source 1..20: mol_type = other RNA
ctgaaaagggtaaggggtgg

SEQ ID NO: 10302 - RNA, 20 nt, synthetic construct
  misc_feature 1..20: note = source = /note="Description of Artificial Sequence: Synthetic oligonucleotide"
  source 1..20: mol_type = other RNA
actctgaaaagggtaagggg

SEQ ID NO: 10303 - RNA, 20 nt, synthetic construct
  misc_feature 1..20: note = source = /note="Description of Artificial Sequence: Synthetic oligonucleotide"
  source 1..20: mol_type = other RNA
ggtactctgaaaagggtaag

SEQ ID NO: 10304 - RNA, 20 nt, synthetic construct
  misc_feature 1..20: note = source = /note="Description of Artificial Sequence: Synthetic oligonucleotide"
  source 1..20: mol_type = other RNA
gggtactctgaaaagggtaa

SEQ ID NO: 10305 - RNA, 20 nt, synthetic construct
  misc_feature 1..20: note = source = /note="Description of Artificial Sequence: Synthetic oligonucleotide"
  source 1..20: mol_type = other RNA
tgggtactctgaaaagggta

SEQ ID NO: 10306 - RNA, 20 nt, synthetic construct
  misc_feature 1..20: note = source = /note="Description of Artificial Sequence: Synthetic oligonucleotide"
  source 1..20: mol_type = other RNA
ataagtgggtactctgaaaa

SEQ ID NO: 10307 - RNA, 20 nt, synthetic construct
  misc_feature 1..20: note = source = /note="Description of Artificial Sequence: Synthetic oligonucleotide"
  source 1..20: mol_type = other RNA
tataagtgggtactctgaaa

SEQ ID NO: 10308 - RNA, 20 nt, synthetic construct
  misc_feature 1..20: note = source = /note="Description of Artificial Sequence: Synthetic oligonucleotide"
  source 1..20: mol_type = other RNA
tgaaatatgaccatataagt

SEQ ID NO: 10309 - RNA, 20 nt, synthetic construct
  misc_feature 1..20: note = source = /note="Description of Artificial Sequence: Synthetic oligonucleotide"
  source 1..20: mol_type = other RNA
ctgaaatatgaccatataag

SEQ ID NO: 10310 - RNA, 20 nt, synthetic construct
  misc_feature 1..20: note = source = /note="Description of Artificial Sequence: Synthetic oligonucleotide"
  source 1..20: mol_type = other RNA
ggtaaagatttggctgatac

SEQ ID NO: 10311 - RNA, 20 nt, synthetic construct
  misc_feature 1..20: note = source = /note="Description of Artificial Sequence: Synthetic oligonucleotide"
  source 1..20: mol_type = other RNA
aaaatgaaaaggtaaagatt

SEQ ID NO: 10312 - RNA, 20 nt, synthetic construct
  misc_feature 1..20: note = source = /note="Description of Artificial Sequence: Synthetic oligonucleotide"
  source 1..20: mol_type = other RNA
taaaaatataaaaaatgaaa

SEQ ID NO: 10313 - RNA, 20 nt, synthetic construct
  misc_feature 1..20: note = source = /note="Description of Artificial Sequence: Synthetic oligonucleotide"
  source 1..20: mol_type = other RNA
gaaatgacttcctctgtttt

SEQ ID NO: 10314 - RNA, 20 nt, synthetic construct
  misc_feature 1..20: note = source = /note="Description of Artificial Sequence: Synthetic oligonucleotide"
  source 1..20: mol_type = other RNA
tgtgaagcctcttcaaaaac

SEQ ID NO: 10315 - RNA, 20 nt, synthetic construct
  misc_feature 1..20: note = source = /note="Description of Artificial Sequence: Synthetic oligonucleotide"
  source 1..20: mol_type = other RNA
tcacatatgtttctgtctat

SEQ ID NO: 10316 - RNA, 20 nt, synthetic construct
  misc_feature 1..20: note = source = /note="Description of Artificial Sequence: Synthetic oligonucleotide"
  source 1..20: mol_type = other RNA
ttcacatatgtttctgtcta

SEQ ID NO: 10317 - RNA, 20 nt, synthetic construct
  misc_feature 1..20: note = source = /note="Description of Artificial Sequence: Synthetic oligonucleotide"
  source 1..20: mol_type = other RNA
ctatcaggaacagttagctg

SEQ ID NO: 10318 - RNA, 20 nt, synthetic construct
  misc_feature 1..20: note = source = /note="Description of Artificial Sequence: Synthetic oligonucleotide"
  source 1..20: mol_type = other RNA
accctttctctgagtctatc

SEQ ID NO: 10319 - RNA, 20 nt, synthetic construct
  misc_feature 1..20: note = source = /note="Description of Artificial Sequence: Synthetic oligonucleotide"
  source 1..20: mol_type = other RNA
aatagcaacaaaatggtaca

SEQ ID NO: 10320 - RNA, 20 nt, synthetic construct
  misc_feature 1..20: note = source = /note="Description of Artificial Sequence: Synthetic oligonucleotide"
  source 1..20: mol_type = other RNA
aaatagcaacaaaatggtac

SEQ ID NO: 10321 - RNA, 20 nt, synthetic construct
  misc_feature 1..20: note = source = /note="Description of Artificial Sequence: Synthetic oligonucleotide"
  source 1..20: mol_type = other RNA
taatgaaaatagcaacaaaa

SEQ ID NO: 10322 - RNA, 20 nt, synthetic construct
  misc_feature 1..20: note = source = /note="Description of Artificial Sequence: Synthetic oligonucleotide"
  source 1..20: mol_type = other RNA
agtattcagatttgtgttgg

SEQ ID NO: 10323 - RNA, 20 nt, synthetic construct
  misc_feature 1..20: note = source = /note="Description of Artificial Sequence: Synthetic oligonucleotide"
  source 1..20: mol_type = other RNA
ctcagtattcagatttgtgt

SEQ ID NO: 10324 - RNA, 20 nt, synthetic construct
  misc_feature 1..20: note = source = /note="Description of Artificial Sequence: Synthetic oligonucleotide"
  source 1..20: mol_type = other RNA
gacattacagcctcaactac

SEQ ID NO: 10325 - RNA, 20 nt, synthetic construct
  misc_feature 1..20: note = source = /note="Description of Artificial Sequence: Synthetic oligonucleotide"
  source 1..20: mol_type = other RNA
ttgtagataaatgtgttgtg

SEQ ID NO: 10326 - RNA, 20 nt, synthetic construct
  misc_feature 1..20: note = source = /note="Description of Artificial Sequence: Synthetic oligonucleotide"
  source 1..20: mol_type = other RNA
attaaaaatgaaaattattt

SEQ ID NO: 10327 - RNA, 20 nt, synthetic construct
  misc_feature 1..20: note = source = /note="Description of Artificial Sequence: Synthetic oligonucleotide"
  source 1..20: mol_type = other RNA
ccccatcaacttgtaagttc

SEQ ID NO: 10328 - RNA, 20 nt, synthetic construct
  misc_feature 1..20: note = source = /note="Description of Artificial Sequence: Synthetic oligonucleotide"
  source 1..20: mol_type = other RNA
cccatcaacttgtaagttct

SEQ ID NO: 10329 - RNA, 20 nt, synthetic construct
  misc_feature 1..20: note = source = /note="Description of Artificial Sequence: Synthetic oligonucleotide"
  source 1..20: mol_type = other RNA
ccatcaacttgtaagttctg

SEQ ID NO: 10330 - RNA, 20 nt, synthetic construct
  misc_feature 1..20: note = source = /note="Description of Artificial Sequence: Synthetic oligonucleotide"
  source 1..20: mol_type = other RNA
aagttctggggtacacatgc

SEQ ID NO: 10331 - RNA, 20 nt, synthetic construct
  misc_feature 1..20: note = source = /note="Description of Artificial Sequence: Synthetic oligonucleotide"
  source 1..20: mol_type = other RNA
ggtacacatgcaggatgtgc

SEQ ID NO: 10332 - RNA, 20 nt, synthetic construct
  misc_feature 1..20: note = source = /note="Description of Artificial Sequence: Synthetic oligonucleotide"
  source 1..20: mol_type = other RNA
gatgtgcaggtttgttatac

SEQ ID NO: 10333 - RNA, 20 nt, synthetic construct
  misc_feature 1..20: note = source = /note="Description of Artificial Sequence: Synthetic oligonucleotide"
  source 1..20: mol_type = other RNA
atacaggtaaacatgtgcca

SEQ ID NO: 10334 - RNA, 20 nt, synthetic construct
  misc_feature 1..20: note = source = /note="Description of Artificial Sequence: Synthetic oligonucleotide"
  source 1..20: mol_type = other RNA
cacagatcaacccattacct

SEQ ID NO: 10335 - RNA, 20 nt, synthetic construct
  misc_feature 1..20: note = source = /note="Description of Artificial Sequence: Synthetic oligonucleotide"
  source 1..20: mol_type = other RNA
cctgatgcacccctaccaat

SEQ ID NO: 10336 - RNA, 20 nt, synthetic construct
  misc_feature 1..20: note = source = /note="Description of Artificial Sequence: Synthetic oligonucleotide"
  source 1..20: mol_type = other RNA
aaaatgaacattgttaattt

SEQ ID NO: 10337 - RNA, 20 nt, synthetic construct
  misc_feature 1..20: note = source = /note="Description of Artificial Sequence: Synthetic oligonucleotide"
  source 1..20: mol_type = other RNA
ttggaaagttatatcaatca

SEQ ID NO: 10338 - RNA, 20 nt, synthetic construct
  misc_feature 1..20: note = source = /note="Description of Artificial Sequence: Synthetic oligonucleotide"
  source 1..20: mol_type = other RNA
gagtcttctctaaagtagca

SEQ ID NO: 10339 - RNA, 20 nt, synthetic construct
  misc_feature 1..20: note = source = /note="Description of Artificial Sequence: Synthetic oligonucleotide"
  source 1..20: mol_type = other RNA
agtcttctctaaagtagcaa

SEQ ID NO: 10340 - RNA, 20 nt, synthetic construct
  misc_feature 1..20: note = source = /note="Description of Artificial Sequence: Synthetic oligonucleotide"
  source 1..20: mol_type = other RNA
tctctaaagtagcaagggcc

SEQ ID NO: 10341 - RNA, 20 nt, synthetic construct
  misc_feature 1..20: note = source = /note="Description of Artificial Sequence: Synthetic oligonucleotide"
  source 1..20: mol_type = other RNA
ccaggctttgttctcagaga

SEQ ID NO: 10342 - RNA, 20 nt, synthetic construct
  misc_feature 1..20: note = source = /note="Description of Artificial Sequence: Synthetic oligonucleotide"
  source 1..20: mol_type = other RNA
gagatattgcaccatcaaca

SEQ ID NO: 10343 - RNA, 20 nt, synthetic construct
  misc_feature 1..20: note = source = /note="Description of Artificial Sequence: Synthetic oligonucleotide"
  source 1..20: mol_type = other RNA
caccatcaacatggaaaaca

SEQ ID NO: 10344 - RNA, 20 nt, synthetic construct
  misc_feature 1..20: note = source = /note="Description of Artificial Sequence: Synthetic oligonucleotide"
  source 1..20: mol_type = other RNA
atggaaaacatggaaaagtc

SEQ ID NO: 10345 - RNA, 20 nt, synthetic construct
  misc_feature 1..20: note = source = /note="Description of Artificial Sequence: Synthetic oligonucleotide"
  source 1..20: mol_type = other RNA
aaacagcaactttttttaac

SEQ ID NO: 10346 - RNA, 20 nt, synthetic construct
  misc_feature 1..20: note = source = /note="Description of Artificial Sequence: Synthetic oligonucleotide"
  source 1..20: mol_type = other RNA
cgatgaaattcattgtaatt

SEQ ID NO: 10347 - RNA, 20 nt, synthetic construct
  misc_feature 1..20: note = source = /note="Description of Artificial Sequence: Synthetic oligonucleotide"
  source 1..20: mol_type = other RNA
attcattgtaatttggcagt

SEQ ID NO: 10348 - RNA, 20 nt, synthetic construct
  misc_feature 1..20: note = source = /note="Description of Artificial Sequence: Synthetic oligonucleotide"
  source 1..20: mol_type = other RNA
gcagtaggccaaattagtag

SEQ ID NO: 10349 - RNA, 20 nt, synthetic construct
  misc_feature 1..20: note = source = /note="Description of Artificial Sequence: Synthetic oligonucleotide"
  source 1..20: mol_type = other RNA
tagtagaggagctaatagtt

SEQ ID NO: 10350 - RNA, 20 nt, synthetic construct
  misc_feature 1..20: note = source = /note="Description of Artificial Sequence: Synthetic oligonucleotide"
  source 1..20: mol_type = other RNA
aacacagtaaaccagaactg

SEQ ID NO: 10351 - RNA, 20 nt, synthetic construct
  misc_feature 1..20: note = source = /note="Description of Artificial Sequence: Synthetic oligonucleotide"
  source 1..20: mol_type = other RNA
aacaagaccttgaattttgt

SEQ ID NO: 10352 - RNA, 20 nt, synthetic construct
  misc_feature 1..20: note = source = /note="Description of Artificial Sequence: Synthetic oligonucleotide"
  source 1..20: mol_type = other RNA
gcaaatgagctcttccaaaa

SEQ ID NO: 10353 - RNA, 20 nt, synthetic construct
  misc_feature 1..20: note = source = /note="Description of Artificial Sequence: Synthetic oligonucleotide"
  source 1..20: mol_type = other RNA
caaatgagctcttccaaaat

SEQ ID NO: 10354 - RNA, 20 nt, synthetic construct
  misc_feature 1..20: note = source = /note="Description of Artificial Sequence: Synthetic oligonucleotide"
  source 1..20: mol_type = other RNA
atgggaaaaagaaaatacat

SEQ ID NO: 10355 - RNA, 20 nt, synthetic construct
  misc_feature 1..20: note = source = /note="Description of Artificial Sequence: Synthetic oligonucleotide"
  source 1..20: mol_type = other RNA
atacattggtgacaaaacac

SEQ ID NO: 10356 - RNA, 20 nt, synthetic construct
  misc_feature 1..20: note = source = /note="Description of Artificial Sequence: Synthetic oligonucleotide"
  source 1..20: mol_type = other RNA
taaacttaacctactgtttt

SEQ ID NO: 10357 - RNA, 20 nt, synthetic construct
  misc_feature 1..20: note = source = /note="Description of Artificial Sequence: Synthetic oligonucleotide"
  source 1..20: mol_type = other RNA
aatatgattgagagagagag

SEQ ID NO: 10358 - RNA, 20 nt, synthetic construct
  misc_feature 1..20: note = source = /note="Description of Artificial Sequence: Synthetic oligonucleotide"
  source 1..20: mol_type = other RNA
atatgattgagagagagaga

SEQ ID NO: 10359 - RNA, 20 nt, synthetic construct
  misc_feature 1..20: note = source = /note="Description of Artificial Sequence: Synthetic oligonucleotide"
  source 1..20: mol_type = other RNA
tatgattgagagagagagag

SEQ ID NO: 10360 - RNA, 20 nt, synthetic construct
  misc_feature 1..20: note = source = /note="Description of Artificial Sequence: Synthetic oligonucleotide"
  source 1..20: mol_type = other RNA
ccttagacatgttgagtctg

SEQ ID NO: 10361 - RNA, 20 nt, synthetic construct
  misc_feature 1..20: note = source = /note="Description of Artificial Sequence: Synthetic oligonucleotide"
  source 1..20: mol_type = other RNA
acatgttgagtctgtggttt

SEQ ID NO: 10362 - RNA, 20 nt, synthetic construct
  misc_feature 1..20: note = source = /note="Description of Artificial Sequence: Synthetic oligonucleotide"
  source 1..20: mol_type = other RNA
tgttgagtctgtggtttagg

SEQ ID NO: 10363 - RNA, 20 nt, synthetic construct
  misc_feature 1..20: note = source = /note="Description of Artificial Sequence: Synthetic oligonucleotide"
  source 1..20: mol_type = other RNA
gttgagtctgtggtttagga

SEQ ID NO: 10364 - RNA, 20 nt, synthetic construct
  misc_feature 1..20: note = source = /note="Description of Artificial Sequence: Synthetic oligonucleotide"
  source 1..20: mol_type = other RNA
ttgagtctgtggtttaggag

SEQ ID NO: 10365 - RNA, 20 nt, synthetic construct
  misc_feature 1..20: note = source = /note="Description of Artificial Sequence: Synthetic oligonucleotide"
  source 1..20: mol_type = other RNA
aagaaaaaaaatccaaaatt

SEQ ID NO: 10366 - RNA, 20 nt, synthetic construct
  misc_feature 1..20: note = source = /note="Description of Artificial Sequence: Synthetic oligonucleotide"
  source 1..20: mol_type = other RNA
agaaaaaaaatccaaaattt

SEQ ID NO: 10367 - RNA, 20 nt, synthetic construct
  misc_feature 1..20: note = source = /note="Description of Artificial Sequence: Synthetic oligonucleotide"
  source 1..20: mol_type = other RNA
aaaaaatccaaaatttggga

SEQ ID NO: 10368 - RNA, 20 nt, synthetic construct
  misc_feature 1..20: note = source = /note="Description of Artificial Sequence: Synthetic oligonucleotide"
  source 1..20: mol_type = other RNA
tccaaaatttgggatggtat

SEQ ID NO: 10369 - RNA, 20 nt, synthetic construct
  misc_feature 1..20: note = source = /note="Description of Artificial Sequence: Synthetic oligonucleotide"
  source 1..20: mol_type = other RNA
aatttgggatggtattggcc

SEQ ID NO: 10370 - RNA, 20 nt, synthetic construct
  misc_feature 1..20: note = source = /note="Description of Artificial Sequence: Synthetic oligonucleotide"
  source 1..20: mol_type = other RNA
tgattcatttccaagctcag

SEQ ID NO: 10371 - RNA, 20 nt, synthetic construct
  misc_feature 1..20: note = source = /note="Description of Artificial Sequence: Synthetic oligonucleotide"
  source 1..20: mol_type = other RNA
cttgataagtgtttattgac

SEQ ID NO: 10372 - RNA, 20 nt, synthetic construct
  misc_feature 1..20: note = source = /note="Description of Artificial Sequence: Synthetic oligonucleotide"
  source 1..20: mol_type = other RNA
taagtaaatactgttcactt

SEQ ID NO: 10373 - RNA, 20 nt, synthetic construct
  misc_feature 1..20: note = source = /note="Description of Artificial Sequence: Synthetic oligonucleotide"
  source 1..20: mol_type = other RNA
tgtctctgctcccttttaac

SEQ ID NO: 10374 - RNA, 20 nt, synthetic construct
  misc_feature 1..20: note = source = /note="Description of Artificial Sequence: Synthetic oligonucleotide"
  source 1..20: mol_type = other RNA
cccttttaactggcttctgc

SEQ ID NO: 10375 - RNA, 20 nt, synthetic construct
  misc_feature 1..20: note = source = /note="Description of Artificial Sequence: Synthetic oligonucleotide"
  source 1..20: mol_type = other RNA
tcatatgactttttaaagtg

SEQ ID NO: 10376 - RNA, 20 nt, synthetic construct
  misc_feature 1..20: note = source = /note="Description of Artificial Sequence: Synthetic oligonucleotide"
  source 1..20: mol_type = other RNA
aactgtgttaacttcctttc

SEQ ID NO: 10377 - RNA, 20 nt, synthetic construct
  misc_feature 1..20: note = source = /note="Description of Artificial Sequence: Synthetic oligonucleotide"
  source 1..20: mol_type = other RNA
agcaaattccattgcatgcc

SEQ ID NO: 10378 - RNA, 20 nt, synthetic construct
  misc_feature 1..20: note = source = /note="Description of Artificial Sequence: Synthetic oligonucleotide"
  source 1..20: mol_type = other RNA
aaacattttccttcccattt

SEQ ID NO: 10379 - RNA, 20 nt, synthetic construct
  misc_feature 1..20: note = source = /note="Description of Artificial Sequence: Synthetic oligonucleotide"
  source 1..20: mol_type = other RNA
tttaggaatttacttaccag

SEQ ID NO: 10380 - RNA, 20 nt, synthetic construct
  misc_feature 1..20: note = source = /note="Description of Artificial Sequence: Synthetic oligonucleotide"
  source 1..20: mol_type = other RNA
ttaggaatttacttaccagt

SEQ ID NO: 10381 - RNA, 20 nt, synthetic construct
  misc_feature 1..20: note = source = /note="Description of Artificial Sequence: Synthetic oligonucleotide"
  source 1..20: mol_type = other RNA
taggaatttacttaccagtg

SEQ ID NO: 10382 - RNA, 20 nt, synthetic construct
  misc_feature 1..20: note = source = /note="Description of Artificial Sequence: Synthetic oligonucleotide"
  source 1..20: mol_type = other RNA
aggaatttacttaccagtgg

SEQ ID NO: 10383 - RNA, 20 nt, synthetic construct
  misc_feature 1..20: note = source = /note="Description of Artificial Sequence: Synthetic oligonucleotide"
  source 1..20: mol_type = other RNA
ttaccagtgggggtgaagag

SEQ ID NO: 10384 - RNA, 20 nt, synthetic construct
  misc_feature 1..20: note = source = /note="Description of Artificial Sequence: Synthetic oligonucleotide"
  source 1..20: mol_type = other RNA
taccagtgggggtgaagaga

SEQ ID NO: 10385 - RNA, 20 nt, synthetic construct
  misc_feature 1..20: note = source = /note="Description of Artificial Sequence: Synthetic oligonucleotide"
  source 1..20: mol_type = other RNA
tacaaaagcactagaagatg

SEQ ID NO: 10386 - RNA, 20 nt, synthetic construct
  misc_feature 1..20: note = source = /note="Description of Artificial Sequence: Synthetic oligonucleotide"
  source 1..20: mol_type = other RNA
actagaagatgaggtcaaag

SEQ ID NO: 10387 - RNA, 20 nt, synthetic construct
  misc_feature 1..20: note = source = /note="Description of Artificial Sequence: Synthetic oligonucleotide"
  source 1..20: mol_type = other RNA
gaggtcaaagcggtcccttg

SEQ ID NO: 10388 - RNA, 20 nt, synthetic construct
  misc_feature 1..20: note = source = /note="Description of Artificial Sequence: Synthetic oligonucleotide"
  source 1..20: mol_type = other RNA
tcaaagcggtcccttgagga

SEQ ID NO: 10389 - RNA, 20 nt, synthetic construct
  misc_feature 1..20: note = source = /note="Description of Artificial Sequence: Synthetic oligonucleotide"
  source 1..20: mol_type = other RNA
caaagcggtcccttgaggaa

SEQ ID NO: 10390 - RNA, 20 nt, synthetic construct
  misc_feature 1..20: note = source = /note="Description of Artificial Sequence: Synthetic oligonucleotide"
  source 1..20: mol_type = other RNA
aggaagggatgactacacca

SEQ ID NO: 10391 - RNA, 20 nt, synthetic construct
  misc_feature 1..20: note = source = /note="Description of Artificial Sequence: Synthetic oligonucleotide"
  source 1..20: mol_type = other RNA
agggatgactacaccaagga

SEQ ID NO: 10392 - RNA, 20 nt, synthetic construct
  misc_feature 1..20: note = source = /note="Description of Artificial Sequence: Synthetic oligonucleotide"
  source 1..20: mol_type = other RNA
tgactacaccaaggaaggat

SEQ ID NO: 10393 - RNA, 20 nt, synthetic construct
  misc_feature 1..20: note = source = /note="Description of Artificial Sequence: Synthetic oligonucleotide"
  source 1..20: mol_type = other RNA
gactacaccaaggaaggata

SEQ ID NO: 10394 - RNA, 20 nt, synthetic construct
  misc_feature 1..20: note = source = /note="Description of Artificial Sequence: Synthetic oligonucleotide"
  source 1..20: mol_type = other RNA
ccaaggaaggatagggagag

SEQ ID NO: 10395 - RNA, 20 nt, synthetic construct
  misc_feature 1..20: note = source = /note="Description of Artificial Sequence: Synthetic oligonucleotide"
  source 1..20: mol_type = other RNA
caaggaaggatagggagaga

SEQ ID NO: 10396 - RNA, 20 nt, synthetic construct
  misc_feature 1..20: note = source = /note="Description of Artificial Sequence: Synthetic oligonucleotide"
  source 1..20: mol_type = other RNA
ggaaggatagggagagaggg

SEQ ID NO: 10397 - RNA, 20 nt, synthetic construct
  misc_feature 1..20: note = source = /note="Description of Artificial Sequence: Synthetic oligonucleotide"
  source 1..20: mol_type = other RNA
atagggagagagggaggaaa

SEQ ID NO: 10398 - RNA, 20 nt, synthetic construct
  misc_feature 1..20: note = source = /note="Description of Artificial Sequence: Synthetic oligonucleotide"
  source 1..20: mol_type = other RNA
tagggagagagggaggaaaa

SEQ ID NO: 10399 - RNA, 20 nt, synthetic construct
  misc_feature 1..20: note = source = /note="Description of Artificial Sequence: Synthetic oligonucleotide"
  source 1..20: mol_type = other RNA
ggagagagggaggaaaaggg

SEQ ID NO: 10400 - RNA, 20 nt, synthetic construct
  misc_feature 1..20: note = source = /note="Description of Artificial Sequence: Synthetic oligonucleotide"
  source 1..20: mol_type = other RNA
aagggaggcacttcaagcag

SEQ ID NO: 10401 - RNA, 20 nt, synthetic construct
  misc_feature 1..20: note = source = /note="Description of Artificial Sequence: Synthetic oligonucleotide"
  source 1..20: mol_type = other RNA
aaagaacattttgctctcaa

SEQ ID NO: 10402 - RNA, 20 nt, synthetic construct
  misc_feature 1..20: note = source = /note="Description of Artificial Sequence: Synthetic oligonucleotide"
  source 1..20: mol_type = other RNA
acattttgctctcaatggaa

SEQ ID NO: 10403 - RNA, 20 nt, synthetic construct
  misc_feature 1..20: note = source = /note="Description of Artificial Sequence: Synthetic oligonucleotide"
  source 1..20: mol_type = other RNA
tgctctcaatggaatggctt

SEQ ID NO: 10404 - RNA, 20 nt, synthetic construct
  misc_feature 1..20: note = source = /note="Description of Artificial Sequence: Synthetic oligonucleotide"
  source 1..20: mol_type = other RNA
ccttagacaaaaaattgtgc

SEQ ID NO: 10405 - RNA, 20 nt, synthetic construct
  misc_feature 1..20: note = source = /note="Description of Artificial Sequence: Synthetic oligonucleotide"
  source 1..20: mol_type = other RNA
ttgctcttatctttgcttaa

SEQ ID NO: 10406 - RNA, 20 nt, synthetic construct
  misc_feature 1..20: note = source = /note="Description of Artificial Sequence: Synthetic oligonucleotide"
  source 1..20: mol_type = other RNA
tgctcttatctttgcttaat

SEQ ID NO: 10407 - RNA, 20 nt, synthetic construct
  misc_feature 1..20: note = source = /note="Description of Artificial Sequence: Synthetic oligonucleotide"
  source 1..20: mol_type = other RNA
tgggtgtcgtatatcactag

SEQ ID NO: 10408 - RNA, 20 nt, synthetic construct
  misc_feature 1..20: note = source = /note="Description of Artificial Sequence: Synthetic oligonucleotide"
  source 1..20: mol_type = other RNA
gtcttgaatgttgttgatgg

SEQ ID NO: 10409 - RNA, 20 nt, synthetic construct
  misc_feature 1..20: note = source = /note="Description of Artificial Sequence: Synthetic oligonucleotide"
  source 1..20: mol_type = other RNA
ggtcttgaatgttgttgatg

SEQ ID NO: 10410 - RNA, 20 nt, synthetic construct
  misc_feature 1..20: note = source = /note="Description of Artificial Sequence: Synthetic oligonucleotide"
  source 1..20: mol_type = other RNA
gggtcttgaatgttgttgat

SEQ ID NO: 10411 - RNA, 20 nt, synthetic construct
  misc_feature 1..20: note = source = /note="Description of Artificial Sequence: Synthetic oligonucleotide"
  source 1..20: mol_type = other RNA
ggggtcttgaatgttgttga

SEQ ID NO: 10412 - RNA, 20 nt, synthetic construct
  misc_feature 1..20: note = source = /note="Description of Artificial Sequence: Synthetic oligonucleotide"
  source 1..20: mol_type = other RNA
tagacacgtcgtttagtggt

SEQ ID NO: 10413 - RNA, 20 nt, synthetic construct
  misc_feature 1..20: note = source = /note="Description of Artificial Sequence: Synthetic oligonucleotide"
  source 1..20: mol_type = other RNA
cccgaattatggatccatta

SEQ ID NO: 10414 - RNA, 20 nt, synthetic construct
  misc_feature 1..20: note = source = /note="Description of Artificial Sequence: Synthetic oligonucleotide"
  source 1..20: mol_type = other RNA
acccgaattatggatccatt

SEQ ID NO: 10415 - RNA, 20 nt, synthetic construct
  misc_feature 1..20: note = source = /note="Description of Artificial Sequence: Synthetic oligonucleotide"
  source 1..20: mol_type = other RNA
tctacgacccgaattatgga

SEQ ID NO: 10416 - RNA, 20 nt, synthetic construct
  misc_feature 1..20: note = source = /note="Description of Artificial Sequence: Synthetic oligonucleotide"
  source 1..20: mol_type = other RNA
cccacgtagtccttctacga

SEQ ID NO: 10417 - RNA, 20 nt, synthetic construct
  misc_feature 1..20: note = source = /note="Description of Artificial Sequence: Synthetic oligonucleotide"
  source 1..20: mol_type = other RNA
ccccacgtagtccttctacg

SEQ ID NO: 10418 - RNA, 20 nt, synthetic construct
  misc_feature 1..20: note = source = /note="Description of Artificial Sequence: Synthetic oligonucleotide"
  source 1..20: mol_type = other RNA
ggataaccatccccacgtag

SEQ ID NO: 10419 - RNA, 20 nt, synthetic construct
  misc_feature 1..20: note = source = /note="Description of Artificial Sequence: Synthetic oligonucleotide"
  source 1..20: mol_type = other RNA
tgtgaccgcggataaccatc

SEQ ID NO: 10420 - RNA, 20 nt, synthetic construct
  misc_feature 1..20: note = source = /note="Description of Artificial Sequence: Synthetic oligonucleotide"
  source 1..20: mol_type = other RNA
gtgtgaccgcggataaccat

SEQ ID NO: 10421 - RNA, 20 nt, synthetic construct
  misc_feature 1..20: note = source = /note="Description of Artificial Sequence: Synthetic oligonucleotide"
  source 1..20: mol_type = other RNA
tgtgtgaccgcggataacca

SEQ ID NO: 10422 - RNA, 20 nt, synthetic construct
  misc_feature 1..20: note = source = /note="Description of Artificial Sequence: Synthetic oligonucleotide"
  source 1..20: mol_type = other RNA
gttgtgtgtgaccgcggata

SEQ ID NO: 10423 - RNA, 20 nt, synthetic construct
  misc_feature 1..20: note = source = /note="Description of Artificial Sequence: Synthetic oligonucleotide"
  source 1..20: mol_type = other RNA
cctcacccctgttgtgtgtg

SEQ ID NO: 10424 - RNA, 20 nt, synthetic construct
  misc_feature 1..20: note = source = /note="Description of Artificial Sequence: Synthetic oligonucleotide"
  source 1..20: mol_type = other RNA
cctgtgtaccaccccctcac

SEQ ID NO: 10425 - RNA, 20 nt, synthetic construct
  misc_feature 1..20: note = source = /note="Description of Artificial Sequence: Synthetic oligonucleotide"
  source 1..20: mol_type = other RNA
acctgtgtaccaccccctca

SEQ ID NO: 10426 - RNA, 20 nt, synthetic construct
  misc_feature 1..20: note = source = /note="Description of Artificial Sequence: Synthetic oligonucleotide"
  source 1..20: mol_type = other RNA
tacctgtgtaccaccccctc

SEQ ID NO: 10427 - RNA, 20 nt, synthetic construct
  misc_feature 1..20: note = source = /note="Description of Artificial Sequence: Synthetic oligonucleotide"
  source 1..20: mol_type = other RNA
tcgtgtacctgtgtaccacc

SEQ ID NO: 10428 - RNA, 20 nt, synthetic construct
  misc_feature 1..20: note = source = /note="Description of Artificial Sequence: Synthetic oligonucleotide"
  source 1..20: mol_type = other RNA
ctcgtgtacctgtgtaccac

SEQ ID NO: 10429 - RNA, 20 nt, synthetic construct
  misc_feature 1..20: note = source = /note="Description of Artificial Sequence: Synthetic oligonucleotide"
  source 1..20: mol_type = other RNA
tctcgtgtacctgtgtacca

SEQ ID NO: 10430 - RNA, 20 nt, synthetic construct
  misc_feature 1..20: note = source = /note="Description of Artificial Sequence: Synthetic oligonucleotide"
  source 1..20: mol_type = other RNA
ttctcgtgtacctgtgtacc

SEQ ID NO: 10431 - RNA, 20 nt, synthetic construct
  misc_feature 1..20: note = source = /note="Description of Artificial Sequence: Synthetic oligonucleotide"
  source 1..20: mol_type = other RNA
atattctcgtgtacctgtgt

SEQ ID NO: 10432 - RNA, 20 nt, synthetic construct
  misc_feature 1..20: note = source = /note="Description of Artificial Sequence: Synthetic oligonucleotide"
  source 1..20: mol_type = other RNA
cattttacatattctcgtgt

SEQ ID NO: 10433 - RNA, 20 nt, synthetic construct
  misc_feature 1..20: note = source = /note="Description of Artificial Sequence: Synthetic oligonucleotide"
  source 1..20: mol_type = other RNA
tgctactttagagaagactc

SEQ ID NO: 10434 - RNA, 20 nt, synthetic construct
  misc_feature 1..20: note = source = /note="Description of Artificial Sequence: Synthetic oligonucleotide"
  source 1..20: mol_type = other RNA
ccatctctgagaacaaagcc

SEQ ID NO: 10435 - RNA, 20 nt, synthetic construct
  misc_feature 1..20: note = source = /note="Description of Artificial Sequence: Synthetic oligonucleotide"
  source 1..20: mol_type = other RNA
ttccatgttttccatgttga

SEQ ID NO: 10436 - RNA, 20 nt, synthetic construct
  misc_feature 1..20: note = source = /note="Description of Artificial Sequence: Synthetic oligonucleotide"
  source 1..20: mol_type = other RNA
tattagctcctctactaatt

SEQ ID NO: 10437 - RNA, 20 nt, synthetic construct
  misc_feature 1..20: note = source = /note="Description of Artificial Sequence: Synthetic oligonucleotide"
  source 1..20: mol_type = other RNA
aggtcttgttacctcagttc

SEQ ID NO: 10438 - RNA, 20 nt, synthetic construct
  misc_feature 1..20: note = source = /note="Description of Artificial Sequence: Synthetic oligonucleotide"
  source 1..20: mol_type = other RNA
ctactaaccaacaaaattca

SEQ ID NO: 10439 - RNA, 20 nt, synthetic construct
  misc_feature 1..20: note = source = /note="Description of Artificial Sequence: Synthetic oligonucleotide"
  source 1..20: mol_type = other RNA
gtattttctttttcccattt

SEQ ID NO: 10440 - RNA, 20 nt, synthetic construct
  misc_feature 1..20: note = source = /note="Description of Artificial Sequence: Synthetic oligonucleotide"
  source 1..20: mol_type = other RNA
acaaatccaaattttgaaac

SEQ ID NO: 10441 - RNA, 20 nt, synthetic construct
  misc_feature 1..20: note = source = /note="Description of Artificial Sequence: Synthetic oligonucleotide"
  source 1..20: mol_type = other RNA
aacaaatccaaattttgaaa

SEQ ID NO: 10442 - RNA, 20 nt, synthetic construct
  misc_feature 1..20: note = source = /note="Description of Artificial Sequence: Synthetic oligonucleotide"
  source 1..20: mol_type = other RNA
taacaaatccaaattttgaa

SEQ ID NO: 10443 - RNA, 20 nt, synthetic construct
  misc_feature 1..20: note = source = /note="Description of Artificial Sequence: Synthetic oligonucleotide"
  source 1..20: mol_type = other RNA
taaaacagtaggttaacaaa

SEQ ID NO: 10444 - RNA, 20 nt, synthetic construct
  misc_feature 1..20: note = source = /note="Description of Artificial Sequence: Synthetic oligonucleotide"
  source 1..20: mol_type = other RNA
ttttagaaacctaaaacagt

SEQ ID NO: 10445 - RNA, 20 nt, synthetic construct
  misc_feature 1..20: note = source = /note="Description of Artificial Sequence: Synthetic oligonucleotide"
  source 1..20: mol_type = other RNA
ccacagactcaacatgtcta

SEQ ID NO: 10446 - RNA, 20 nt, synthetic construct
  misc_feature 1..20: note = source = /note="Description of Artificial Sequence: Synthetic oligonucleotide"
  source 1..20: mol_type = other RNA
cagctgtaatctattttgat

SEQ ID NO: 10447 - RNA, 20 nt, synthetic construct
  misc_feature 1..20: note = source = /note="Description of Artificial Sequence: Synthetic oligonucleotide"
  source 1..20: mol_type = other RNA
acagctgtaatctattttga

SEQ ID NO: 10448 - RNA, 20 nt, synthetic construct
  misc_feature 1..20: note = source = /note="Description of Artificial Sequence: Synthetic oligonucleotide"
  source 1..20: mol_type = other RNA
agacataaagcaggaggcta

SEQ ID NO: 10449 - RNA, 20 nt, synthetic construct
  misc_feature 1..20: note = source = /note="Description of Artificial Sequence: Synthetic oligonucleotide"
  source 1..20: mol_type = other RNA
aactgcagacataaagcagg

SEQ ID NO: 10450 - RNA, 20 nt, synthetic construct
  misc_feature 1..20: note = source = /note="Description of Artificial Sequence: Synthetic oligonucleotide"
  source 1..20: mol_type = other RNA
acaaactgcagacataaagc

SEQ ID NO: 10451 - RNA, 20 nt, synthetic construct
  misc_feature 1..20: note = source = /note="Description of Artificial Sequence: Synthetic oligonucleotide"
  source 1..20: mol_type = other RNA
gccaataccatcccaaattt

SEQ ID NO: 10452 - RNA, 20 nt, synthetic construct
  misc_feature 1..20: note = source = /note="Description of Artificial Sequence: Synthetic oligonucleotide"
  source 1..20: mol_type = other RNA
gtttgcttttgttaatggcc

SEQ ID NO: 10453 - RNA, 20 nt, synthetic construct
  misc_feature 1..20: note = source = /note="Description of Artificial Sequence: Synthetic oligonucleotide"
  source 1..20: mol_type = other RNA
aactggtttgcttttgttaa

SEQ ID NO: 10454 - RNA, 20 nt, synthetic construct
  misc_feature 1..20: note = source = /note="Description of Artificial Sequence: Synthetic oligonucleotide"
  source 1..20: mol_type = other RNA
atggctagttttaagcaaac

SEQ ID NO: 10455 - RNA, 20 nt, synthetic construct
  misc_feature 1..20: note = source = /note="Description of Artificial Sequence: Synthetic oligonucleotide"
  source 1..20: mol_type = other RNA
acttcatgaagcagcaaaga

SEQ ID NO: 10456 - RNA, 20 nt, synthetic construct
  misc_feature 1..20: note = source = /note="Description of Artificial Sequence: Synthetic oligonucleotide"
  source 1..20: mol_type = other RNA
taacttagttcctctgagct

SEQ ID NO: 10457 - RNA, 20 nt, synthetic construct
  misc_feature 1..20: note = source = /note="Description of Artificial Sequence: Synthetic oligonucleotide"
  source 1..20: mol_type = other RNA
gttaaaagggagcagagaca

SEQ ID NO: 10458 - RNA, 20 nt, synthetic construct
  misc_feature 1..20: note = source = /note="Description of Artificial Sequence: Synthetic oligonucleotide"
  source 1..20: mol_type = other RNA
cctgcagaagccagttaaaa

SEQ ID NO: 10459 - RNA, 20 nt, synthetic construct
  misc_feature 1..20: note = source = /note="Description of Artificial Sequence: Synthetic oligonucleotide"
  source 1..20: mol_type = other RNA
acctgcagaagccagttaaa

SEQ ID NO: 10460 - RNA, 20 nt, synthetic construct
  misc_feature 1..20: note = source = /note="Description of Artificial Sequence: Synthetic oligonucleotide"
  source 1..20: mol_type = other RNA
tggcagttctgagaacagaa

SEQ ID NO: 10461 - RNA, 20 nt, synthetic construct
  misc_feature 1..20: note = source = /note="Description of Artificial Sequence: Synthetic oligonucleotide"
  source 1..20: mol_type = other RNA
atggcagttctgagaacaga

SEQ ID NO: 10462 - RNA, 20 nt, synthetic construct
  misc_feature 1..20: note = source = /note="Description of Artificial Sequence: Synthetic oligonucleotide"
  source 1..20: mol_type = other RNA
acaaatagatgaaactgcaa

SEQ ID NO: 10463 - RNA, 20 nt, synthetic construct
  misc_feature 1..20: note = source = /note="Description of Artificial Sequence: Synthetic oligonucleotide"
  source 1..20: mol_type = other RNA
tataagcaggctttccagaa

SEQ ID NO: 10464 - RNA, 20 nt, synthetic construct
  misc_feature 1..20: note = source = /note="Description of Artificial Sequence: Synthetic oligonucleotide"
  source 1..20: mol_type = other RNA
acaagtgctactttataagc

SEQ ID NO: 10465 - RNA, 20 nt, synthetic construct
  misc_feature 1..20: note = source = /note="Description of Artificial Sequence: Synthetic oligonucleotide"
  source 1..20: mol_type = other RNA
agatttattatgtaagattc

SEQ ID NO: 10466 - RNA, 20 nt, synthetic construct
  misc_feature 1..20: note = source = /note="Description of Artificial Sequence: Synthetic oligonucleotide"
  source 1..20: mol_type = other RNA
aagatttattatgtaagatt

SEQ ID NO: 10467 - RNA, 20 nt, synthetic construct
  misc_feature 1..20: note = source = /note="Description of Artificial Sequence: Synthetic oligonucleotide"
  source 1..20: mol_type = other RNA
gaagtaacggaccgtacgtt

SEQ ID NO: 10468 - RNA, 20 nt, synthetic construct
  misc_feature 1..20: note = source = /note="Description of Artificial Sequence: Synthetic oligonucleotide"
  source 1..20: mol_type = other RNA
aatgaatgaagaagtaacgg

SEQ ID NO: 10469 - RNA, 20 nt, synthetic construct
  misc_feature 1..20: note = source = /note="Description of Artificial Sequence: Synthetic oligonucleotide"
  source 1..20: mol_type = other RNA
ttcatttaaggatttaccct

SEQ ID NO: 10470 - RNA, 20 nt, synthetic construct
  misc_feature 1..20: note = source = /note="Description of Artificial Sequence: Synthetic oligonucleotide"
  source 1..20: mol_type = other RNA
accattcatttaaggattta

SEQ ID NO: 10471 - RNA, 20 nt, synthetic construct
  misc_feature 1..20: note = source = /note="Description of Artificial Sequence: Synthetic oligonucleotide"
  source 1..20: mol_type = other RNA
gaccattcatttaaggattt

SEQ ID NO: 10472 - RNA, 20 nt, synthetic construct
  misc_feature 1..20: note = source = /note="Description of Artificial Sequence: Synthetic oligonucleotide"
  source 1..20: mol_type = other RNA
tcgggagagaagtgggggtg

SEQ ID NO: 10473 - RNA, 20 nt, synthetic construct
  misc_feature 1..20: note = source = /note="Description of Artificial Sequence: Synthetic oligonucleotide"
  source 1..20: mol_type = other RNA
acatcagtagggaaggagtt

SEQ ID NO: 10474 - RNA, 20 nt, synthetic construct
  misc_feature 1..20: note = source = /note="Description of Artificial Sequence: Synthetic oligonucleotide"
  source 1..20: mol_type = other RNA
cacatcagtagggaaggagt

SEQ ID NO: 10475 - RNA, 20 nt, synthetic construct
  misc_feature 1..20: note = source = /note="Description of Artificial Sequence: Synthetic oligonucleotide"
  source 1..20: mol_type = other RNA
ggagagagggataggaagga

SEQ ID NO: 10476 - RNA, 20 nt, synthetic construct
  misc_feature 1..20: note = source = /note="Description of Artificial Sequence: Synthetic oligonucleotide"
  source 1..20: mol_type = other RNA
attgagagcaaaatgttgaa

SEQ ID NO: 10477 - RNA, 20 nt, synthetic construct
  misc_feature 1..20: note = source = /note="Description of Artificial Sequence: Synthetic oligonucleotide"
  source 1..20: mol_type = other RNA
ccagcacaattttttgtcta

SEQ ID NO: 10478 - RNA, 20 nt, synthetic construct
  misc_feature 1..20: note = source = /note="Description of Artificial Sequence: Synthetic oligonucleotide"
  source 1..20: mol_type = other RNA
caaagataagagcaaagtca

SEQ ID NO: 10479 - RNA, 20 nt, synthetic construct
  misc_feature 1..20: note = source = /note="Description of Artificial Sequence: Synthetic oligonucleotide"
  source 1..20: mol_type = other RNA
gcaaagataagagcaaagtc

SEQ ID NO: 10480 - RNA, 20 nt, synthetic construct
  misc_feature 1..20: note = source = /note="Description of Artificial Sequence: Synthetic oligonucleotide"
  source 1..20: mol_type = other RNA
tagtgaggatacttaaatgt

SEQ ID NO: 10481 - RNA, 20 nt, synthetic construct
  misc_feature 1..20: note = source = /note="Description of Artificial Sequence: Synthetic oligonucleotide"
  source 1..20: mol_type = other RNA
ttattttatgaaggctagtg

SEQ ID NO: 10482 - RNA, 20 nt, synthetic construct
  misc_feature 1..20: note = source = /note="Description of Artificial Sequence: Synthetic oligonucleotide"
  source 1..20: mol_type = other RNA
tgttgatgattattttatga

SEQ ID NO: 10483 - RNA, 20 nt, synthetic construct
  misc_feature 1..20: note = source = /note="Description of Artificial Sequence: Synthetic oligonucleotide"
  source 1..20: mol_type = other RNA
ctttgtcggcaagtcttgac

SEQ ID NO: 10484 - RNA, 20 nt, synthetic construct
  misc_feature 1..20: note = source = /note="Description of Artificial Sequence: Synthetic oligonucleotide"
  source 1..20: mol_type = other RNA
gtctctgacgtggatgagtt

SEQ ID NO: 10485 - RNA, 20 nt, synthetic construct
  misc_feature 1..20: note = source = /note="Description of Artificial Sequence: Synthetic oligonucleotide"
  source 1..20: mol_type = other RNA
agagcaccagagtgccgtct

SEQ ID NO: 10486 - RNA, 20 nt, synthetic construct
  misc_feature 1..20: note = source = /note="Description of Artificial Sequence: Synthetic oligonucleotide"
  source 1..20: mol_type = other RNA
tctctgacgtggatgagttt

SEQ ID NO: 10487 - RNA, 20 nt, synthetic construct
  misc_feature 1..20: note = source = /note="Description of Artificial Sequence: Synthetic oligonucleotide"
  source 1..20: mol_type = other RNA
cagtcaagacttgccgacaa

SEQ ID NO: 10488 - RNA, 20 nt, synthetic construct
  misc_feature 1..20: note = source = /note="Description of Artificial Sequence: Synthetic oligonucleotide"
  source 1..20: mol_type = other RNA
gtgagagtgcatacctggta

SEQ ID NO: 10489 - RNA, 20 nt, synthetic construct
  misc_feature 1..20: note = source = /note="Description of Artificial Sequence: Synthetic oligonucleotide"
  source 1..20: mol_type = other RNA
ctctagtgagagtgcatacc

SEQ ID NO: 10490 - RNA, 20 nt, synthetic construct
  misc_feature 1..20: note = source = /note="Description of Artificial Sequence: Synthetic oligonucleotide"
  source 1..20: mol_type = other RNA
atttgagctgttctccaggg

SEQ ID NO: 10491 - RNA, 20 nt, synthetic construct
  misc_feature 1..20: note = source = /note="Description of Artificial Sequence: Synthetic oligonucleotide"
  source 1..20: mol_type = other RNA
cagagcaccagagtgccgtc

SEQ ID NO: 10492 - RNA, 20 nt, synthetic construct
  misc_feature 1..20: note = source = /note="Description of Artificial Sequence: Synthetic oligonucleotide"
  source 1..20: mol_type = other RNA
cgcaagccaggctaaacagt

SEQ ID NO: 10493 - RNA, 20 nt, synthetic construct
  misc_feature 1..20: note = source = /note="Description of Artificial Sequence: Synthetic oligonucleotide"
  source 1..20: mol_type = other RNA
aaggaaggccgtccattctc

SEQ ID NO: 10494 - RNA, 20 nt, synthetic construct
  misc_feature 1..20: note = source = /note="Description of Artificial Sequence: Synthetic oligonucleotide"
  source 1..20: mol_type = other RNA
agtgagagtgcatacctggt

SEQ ID NO: 10495 - RNA, 20 nt, synthetic construct
  misc_feature 1..20: note = source = /note="Description of Artificial Sequence: Synthetic oligonucleotide"
  source 1..20: mol_type = other RNA
aggaaggccgtccattctca

SEQ ID NO: 10496 - RNA, 20 nt, synthetic construct
  misc_feature 1..20: note = source = /note="Description of Artificial Sequence: Synthetic oligonucleotide"
  source 1..20: mol_type = other RNA
ttcagacccagacggcactc

SEQ ID NO: 10497 - RNA, 20 nt, synthetic construct
  misc_feature 1..20: note = source = /note="Description of Artificial Sequence: Synthetic oligonucleotide"
  source 1..20: mol_type = other RNA
acgtgaagctgctcatcctc

SEQ ID NO: 10498 - RNA, 20 nt, synthetic construct
  misc_feature 1..20: note = source = /note="Description of Artificial Sequence: Synthetic oligonucleotide"
  source 1..20: mol_type = other RNA
ggaaggccgtccattctcag

SEQ ID NO: 10499 - RNA, 20 nt, synthetic construct
  misc_feature 1..20: note = source = /note="Description of Artificial Sequence: Synthetic oligonucleotide"
  source 1..20: mol_type = other RNA
gcatgttgtgcaagtctctg

SEQ ID NO: 10500 - RNA, 20 nt, synthetic construct
  misc_feature 1..20: note = source = /note="Description of Artificial Sequence: Synthetic oligonucleotide"
  source 1..20: mol_type = other RNA
gacttgcacaacatgcagaa

SEQ ID NO: 10501 - RNA, 20 nt, synthetic construct
  misc_feature 1..20: note = source = /note="Description of Artificial Sequence: Synthetic oligonucleotide"
  source 1..20: mol_type = other RNA
gtttgggagtgtggaagctc

SEQ ID NO: 10502 - RNA, 20 nt, synthetic construct
  misc_feature 1..20: note = source = /note="Description of Artificial Sequence: Synthetic oligonucleotide"
  source 1..20: mol_type = other RNA
catgcagaatggcagcacat

SEQ ID NO: 10503 - RNA, 20 nt, synthetic construct
  misc_feature 1..20: note = source = /note="Description of Artificial Sequence: Synthetic oligonucleotide"
  source 1..20: mol_type = other RNA
cgtggatgagtttgggagtg

SEQ ID NO: 10504 - RNA, 20 nt, synthetic construct
  misc_feature 1..20: note = source = /note="Description of Artificial Sequence: Synthetic oligonucleotide"
  source 1..20: mol_type = other RNA
catgttgtgcaagtctctgt

SEQ ID NO: 10505 - RNA, 20 nt, synthetic construct
  misc_feature 1..20: note = source = /note="Description of Artificial Sequence: Synthetic oligonucleotide"
  source 1..20: mol_type = other RNA
tgggagtgtggaagctcagg

SEQ ID NO: 10506 - RNA, 20 nt, synthetic construct
  misc_feature 1..20: note = source = /note="Description of Artificial Sequence: Synthetic oligonucleotide"
  source 1..20: mol_type = other RNA
tgccgtctgggtctgaagga

SEQ ID NO: 10507 - RNA, 20 nt, synthetic construct
  misc_feature 1..20: note = source = /note="Description of Artificial Sequence: Synthetic oligonucleotide"
  source 1..20: mol_type = other RNA
ggccttccttcagacccaga

SEQ ID NO: 10508 - RNA, 20 nt, synthetic construct
  misc_feature 1..20: note = source = /note="Description of Artificial Sequence: Synthetic oligonucleotide"
  source 1..20: mol_type = other RNA
gagatgctgctgatatggtc

SEQ ID NO: 10509 - RNA, 20 nt, synthetic construct
  misc_feature 1..20: note = source = /note="Description of Artificial Sequence: Synthetic oligonucleotide"
  source 1..20: mol_type = other RNA
cctcacagcttgtgtttgta

SEQ ID NO: 10510 - RNA, 20 nt, synthetic construct
  misc_feature 1..20: note = source = /note="Description of Artificial Sequence: Synthetic oligonucleotide"
  source 1..20: mol_type = other RNA
atctttcccatgctgttctc

SEQ ID NO: 10511 - RNA, 20 nt, synthetic construct
  misc_feature 1..20: note = source = /note="Description of Artificial Sequence: Synthetic oligonucleotide"
  source 1..20: mol_type = other RNA
tttgggaaggacccagtggg

SEQ ID NO: 10512 - RNA, 20 nt, synthetic construct
  misc_feature 1..20: note = source = /note="Description of Artificial Sequence: Synthetic oligonucleotide"
  source 1..20: mol_type = other RNA
tgccttcagctatgattgtg

SEQ ID NO: 10513 - RNA, 20 nt, synthetic construct
  misc_feature 1..20: note = source = /note="Description of Artificial Sequence: Synthetic oligonucleotide"
  source 1..20: mol_type = other RNA
gtgaggcctccacagccatg

SEQ ID NO: 10514 - RNA, 20 nt, synthetic construct
  misc_feature 1..20: note = source = /note="Description of Artificial Sequence: Synthetic oligonucleotide"
  source 1..20: mol_type = other RNA
gggaggtaattgaatcatgg

SEQ ID NO: 10515 - RNA, 20 nt, synthetic construct
  misc_feature 1..20: note = source = /note="Description of Artificial Sequence: Synthetic oligonucleotide"
  source 1..20: mol_type = other RNA
agttaggaaaccagaaccta

SEQ ID NO: 10516 - RNA, 20 nt, synthetic construct
  misc_feature 1..20: note = source = /note="Description of Artificial Sequence: Synthetic oligonucleotide"
  source 1..20: mol_type = other RNA
agagtgccgtctgggtctga

SEQ ID NO: 10517 - DNA, 5000 bp, synthetic construct
  misc_difference 1..5000: note = misc_feature - /note="This sequence may encompass 50-5000 nucleotides"
  misc_feature 1..5000: note = source = /note="Description of Artificial Sequence: Synthetic polynucleotide"
  misc_feature 1..5000: note = source = /note="See specification as filed for detailed description of substitutions and preferred embodiments"
  source 1..5000: mol_type = other DNA
aaaaaaaaaaaaaaaaaaaaaaaaaaaaaaaaaaaaaaaaaaaaaaaaaaaaaaaaaaaaaaaaaaaaaaaaaaaaaaaaaaaaaaaaaaaaaaaaaaaaaaaaaaaaaaaaaaaaaaaaaaaaaaaaaaaaaaaaaaaaaaaaaaaaaaaaaaaaaaaaaaaaaaaaaaaaaaaaaaaaaaaaaaaaaaaaaaaaaaaaaaaaaaaaaaaaaaaaaaaaaaaaaaaaaaaaaaaaaaaaaaaaaaaaaaaaaaaaaaaaaaaaaaaaaaaaaaaaaaaaaaaaaaaaaaaaaaaaaaaaaaaaaaaaaaaaaaaaaaaaaaaaaaaaaaaaaaaaaaaaaaaaaaaaaaaaaaaaaaaaaaaaaaaaaaaaaaaaaaaaaaaaaaaaaaaaaaaaaaaaaaaaaaaaaaaaaaaaaaaaaaaaaaaaaaaaaaaaaaaaaaaaaaaaaaaaaaaaaaaaaaaaaaaaaaaaaaaaaaaaaaaaaaaaaaaaaaaaaaaaaaaaaaaaaaaaaaaaaaaaaaaaaaaaaaaaaaaaaaaaaaaaaaaaaaaaaaaaaaaaaaaaaaaaaaaaaaaaaaaaaaaaaaaaaaaaaaaaaaaaaaaaaaaaaaaaaaaaaaaaaaaaaaaaaaaaaaaaaaaaaaaaaaaaaaaaaaaaaaaaaaaaaaaaaaaaaaaaaaaaaaaaaaaaaaaaaaaaaaaaaaaaaaaaaaaaaaaaaaaaaaaaaaaaaaaaaaaaaaaaaaaaaaaaaaaaaaaaaaaaaaaaaaaaaaaaaaaaaaaaaaaaaaaaaaaaaaaaaaaaaaaaaaaaaaaaaaaaaaaaaaaaaaaaaaaaaaaaaaaaaaaaaaaaaaaaaaaaaaaaaaaaaaaaaaaaaaaaaaaaaaaaaaaaaaaaaaaaaaaaaaaaaaaaaaaaaaaaaaaaaaaaaaaaaaaaaaaaaaaaaaaaaaaaaaaaaaaaaaaaaaaaaaaaaaaaaaaaaaaaaaaaaaaaaaaaaaaaaaaaaaaaaaaaaaaaaaaaaaaaaaaaaaaaaaaaaaaaaaaaaaaaaaaaaaaaaaaaaaaaaaaaaaaaaaaaaaaaaaaaaaaaaaaaaaaaaaaaaaaaaaaaaaaaaaaaaaaaaaaaaaaaaaaaaaaaaaaaaaaaaaaaaaaaaaaaaaaaaaaaaaaaaaaaaaaaaaaaaaaaaaaaaaaaaaaaaaaaaaaaaaaaaaaaaaaaaaaaaaaaaaaaaaaaaaaaaaaaaaaaaaaaaaaaaaaaaaaaaaaaaaaaaaaaaaaaaaaaaaaaaaaaaaaaaaaaaaaaaaaaaaaaaaaaaaaaaaaaaaaaaaaaaaaaaaaaaaaaaaaaaaaaaaaaaaaaaaaaaaaaaaaaaaaaaaaaaaaaaaaaaaaaaaaaaaaaaaaaaaaaaaaaaaaaaaaaaaaaaaaaaaaaaaaaaaaaaaaaaaaaaaaaaaaaaaaaaaaaaaaaaaaaaaaaaaaaaaaaaaaaaaaaaaaaaaaaaaaaaaaaaaaaaaaaaaaaaaaaaaaaaaaaaaaaaaaaaaaaaaaaaaaaaaaaaaaaaaaaaaaaaaaaaaaaaaaaaaaaaaaaaaaaaaaaaaaaaaaaaaaaaaaaaaaaaaaaaaaaaaaaaaaaaaaaaaaaaaaaaaaaaaaaaaaaaaaaaaaaaaaaaaaaaaaaaaaaaaaaaaaaaaaaaaaaaaaaaaaaaaaaaaaaaaaaaaaaaaaaaaaaaaaaaaaaaaaaaaaaaaaaaaaaaaaaaaaaaaaaaaaaaaaaaaaaaaaaaaaaaaaaaaaaaaaaaaaaaaaaaaaaaaaaaaaaaaaaaaaaaaaaaaaaaaaaaaaaaaaaaaaaaaaaaaaaaaaaaaaaaaaaaaaaaaaaaaaaaaaaaaaaaaaaaaaaaaaaaaaaaaaaaaaaaaaaaaaaaaaaaaaaaaaaaaaaaaaaaaaaaaaaaaaaaaaaaaaaaaaaaaaaaaaaaaaaaaaaaaaaaaaaaaaaaaaaaaaaaaaaaaaaaaaaaaaaaaaaaaaaaaaaaaaaaaaaaaaaaaaaaaaaaaaaaaaaaaaaaaaaaaaaaaaaaaaaaaaaaaaaaaaaaaaaaaaaaaaaaaaaaaaaaaaaaaaaaaaaaaaaaaaaaaaaaaaaaaaaaaaaaaaaaaaaaaaaaaaaaaaaaaaaaaaaaaaaaaaaaaaaaaaaaaaaaaaaaaaaaaaaaaaaaaaaaaaaaaaaaaaaaaaaaaaaaaaaaaaaaaaaaaaaaaaaaaaaaaaaaaaaaaaaaaaaaaaaaaaaaaaaaaaaaaaaaaaaaaaaaaaaaaaaaaaaaaaaaaaaaaaaaaaaaaaaaaaaaaaaaaaaaaaaaaaaaaaaaaaaaaaaaaaaaaaaaaaaaaaaaaaaaaaaaaaaaaaaaaaaaaaaaaaaaaaaaaaaaaaaaaaaaaaaaaaaaaaaaaaaaaaaaaaaaaaaaaaaaaaaaaaaaaaaaaaaaaaaaaaaaaaaaaaaaaaaaaaaaaaaaaaaaaaaaaaaaaaaaaaaaaaaaaaaaaaaaaaaaaaaaaaaaaaaaaaaaaaaaaaaaaaaaaaaaaaaaaaaaaaaaaaaaaaaaaaaaaaaaaaaaaaaaaaaaaaaaaaaaaaaaaaaaaaaaaaaaaaaaaaaaaaaaaaaaaaaaaaaaaaaaaaaaaaaaaaaaaaaaaaaaaaaaaaaaaaaaaaaaaaaaaaaaaaaaaaaaaaaaaaaaaaaaaaaaaaaaaaaaaaaaaaaaaaaaaaaaaaaaaaaaaaaaaaaaaaaaaaaaaaaaaaaaaaaaaaaaaaaaaaaaaaaaaaaaaaaaaaaaaaaaaaaaaaaaaaaaaaaaaaaaaaaaaaaaaaaaaaaaaaaaaaaaaaaaaaaaaaaaaaaaaaaaaaaaaaaaaaaaaaaaaaaaaaaaaaaaaaaaaaaaaaaaaaaaaaaaaaaaaaaaaaaaaaaaaaaaaaaaaaaaaaaaaaaaaaaaaaaaaaaaaaaaaaaaaaaaaaaaaaaaaaaaaaaaaaaaaaaaaaaaaaaaaaaaaaaaaaaaaaaaaaaaaaaaaaaaaaaaaaaaaaaaaaaaaaaaaaaaaaaaaaaaaaaaaaaaaaaaaaaaaaaaaaaaaaaaaaaaaaaaaaaaaaaaaaaaaaaaaaaaaaaaaaaaaaaaaaaaaaaaaaaaaaaaaaaaaaaaaaaaaaaaaaaaaaaaaaaaaaaaaaaaaaaaaaaaaaaaaaaaaaaaaaaaaaaaaaaaaaaaaaaaaaaaaaaaaaaaaaaaaaaaaaaaaaaaaaaaaaaaaaaaaaaaaaaaaaaaaaaaaaaaaaaaaaaaaaaaaaaaaaaaaaaaaaaaaaaaaaaaaaaaaaaaaaaaaaaaaaaaaaaaaaaaaaaaaaaaaaaaaaaaaaaaaaaaaaaaaaaaaaaaaaaaaaaaaaaaaaaaaaaaaaaaaaaaaaaaaaaaaaaaaaaaaaaaaaaaaaaaaaaaaaaaaaaaaaaaaaaaaaaaaaaaaaaaaaaaaaaaaaaaaaaaaaaaaaaaaaaaaaaaaaaaaaaaaaaaaaaaaaaaaaaaaaaaaaaaaaaaaaaaaaaaaaaaaaaaaaaaaaaaaaaaaaaaaaaaaaaaaaaaaaaaaaaaaaaaaaaaaaaaaaaaaaaaaaaaaaaaaaaaaaaaaaaaaaaaaaaaaaaaaaaaaaaaaaaaaaaaaaaaaaaaaaaaaaaaaaaaaaaaaaaaaaaaaaaaaaaaaaaaaaaaaaaaaaaaaaaaaaaaaaaaaaaaaaaaaaaaaaaaaaaaaaaaaaaaaaaaaaaaaaaaaaaaaaaaaaaaaaaaaaaaaaaaaaaaaaaaaaaaaaaaaaaaaaaaaaaaaaaaaaaaaaaaaaaaaaaaaaaaaaaaaaaaaaaaaaaaaaaaaaaaaaaaaaaaaaaaaaaaaaaaaaaaaaaaaaaaaaaaaaaaaaaaaaaaaaaaaaaaaaaaaaaaaaaaaaaaaaaaaaaaaaaaaaaaaaaaaaaaaaaaaaaaaaaaaaaaaaaaaaaaaaaaaaaaaaaaaaaaaaaaaaaaaaaaaaaaaaaaaaaaaaaaaaaaaaaaaaaaaaaaaaaaaaaaaaaaaaaaaaaaaaaaaaaaaaaaaaaaaaaaaaaaaaaaaaaaaaaaaaaaaaaaaaaaaaaaaaaaaaaaaaaaaaaaaaaaaaaaaaaaaaaaaaaaaaaaaaaaaaaaaaaaaaaaaaaaaaaaaaaaaaaaaaaaaaaaaaaaaaaaaaaaaaaaaaaaaaaaaaaaaaaaaaaaaaaaaaaaaaaaaaaaaaaaaaaaaaaaaaaaaaaaaaaaaaaaaaaaaaaaaaaaaaaaaaaaaaaaaaaaaaaaaaaaaaaaaaaaaaaaaaaaaaaaaaaaaaaaaaaaaaaaaaaaaaaaaaaaaaaaaaaaaaaaaaaaaaaaaaaaaaaaaaaaaaaaaaaaaaaaaaaaaaaaaaaaaaaaaaaaaaaaaaaaaaaaaaaaaaaaaaaaaaaaaaaaaaaaaaaaaaaaaaaaaaaaaaaaaaaaaaaaaaaaaaaaaaaaaaaaaaaaaaaaaaaaaaaaaaaaaaaaaaaaaaaaaaaaaaaaaaaaaaaaaaaaaaaaaaaaaaaaaaaaaaaaaaaaaaaaaaaaaaaaaaaaaaaaaaaaaaaaaaaaaaaaaaaaaaaaaaaaaaaaaaaaaaaaaaaaaaaaaaaaaaaaaaaaaaaaaaaaaaaaaaaaaaaaaaaaaaaaaaaaaaaaaaaaaaaaaaaaaaaaaaaaaaaaaaaaaaaaaaaaaaaaaaaaaaaaaaaaaaaaaaaaaaaaaaaaaaaaaaaaaaaaaaaaaaaaaaaaaaaaaaaaaaaaaaaaaaaaaaaaaaaaaaaaaaaaaaaaaaaaaaaaaaaaaaaaaaaaaaaaaaaaaaaaaaaaaaaaaaaaaaaaaaaaaaaaaaaaaaaaaaaaaaaaaaaaaaaaaaaaaaaaaaaaaaaaaaaaaaaaaaaaaaaaaaaaaaaaaaaaaaaaaaaaaaaaaaaaaaaaaaaaaaaaaaa

SEQ ID NO: 10518 - DNA, 23 bp, synthetic construct
  misc_feature 1..23: note = source = /note="Description of Artificial Sequence: Synthetic primer"
  source 1..23: mol_type = other DNA
acacagccagaccatatcagcag

SEQ ID NO: 10519 - DNA, 22 bp, synthetic construct
  misc_feature 1..22: note = source = /note="Description of Artificial Sequence: Synthetic primer"
  source 1..22: mol_type = other DNA
aaggcacgcaagggccataacc

SEQ ID NO: 10520 - DNA, 20 bp, synthetic construct
  misc_feature 1..20: note = source = /note="Description of Artificial Sequence: Synthetic primer"
  source 1..20: mol_type = other DNA
gaggcctgtgcagactactc

SEQ ID NO: 10521 - DNA, 22 bp, synthetic construct
  misc_feature 1..22: note = source = /note="Description of Artificial Sequence: Synthetic primer"
  source 1..22: mol_type = other DNA
acagaaatcctatgtggcctgc

SEQ ID NO: 10522 - RNA, 20 nt, synthetic construct
  misc_feature 1..20: note = source = /note="Description of Artificial Sequence: Synthetic oligonucleotide"
  source 1..20: mol_type = other RNA
aacatgagatgctgctgata

SEQ ID NO: 10523 - DNA, 16 bp, synthetic construct
  misc_feature 1..16: note = source = /note="Description of Artificial Sequence: Synthetic oligonucleotide"
  source 1..16: mol_type = other DNA
cggtcttgtaattgga

SEQ ID NO: 10524 - DNA, 18 bp, synthetic construct
  misc_feature 1..18: note = source = /note="Description of Artificial Sequence: Synthetic oligonucleotide"
  source 1..18: mol_type = other DNA
atggatcggtcttgtaat

SEQ ID NO: 10525 - DNA, 10 bp, synthetic construct
  misc_feature 1..10: note = source = /note="Description of Artificial Sequence: Synthetic oligonucleotide"
  source 1..10: mol_type = other DNA
gaggcagtgg

SEQ ID NO: 10526 - DNA, 12 bp, synthetic construct
  misc_feature 1..12: note = source = /note="Description of Artificial Sequence: Synthetic oligonucleotide"
  source 1..12: mol_type = other DNA
gcagtggtgagg

SEQ ID NO: 10527 - DNA, 29 bp, synthetic construct
  misc_feature 1..29: note = source = /note="Description of Artificial Sequence: Synthetic oligonucleotide"
  source 1..29: mol_type = other DNA
agtacccacttatatggtcatatttcaga

SEQ ID NO: 10528 - DNA, 23 bp, synthetic construct
  misc_feature 1..23: note = source = /note="Description of Artificial Sequence: Synthetic oligonucleotide"
  source 1..23: mol_type = other DNA
taaatgataactggggctatagt

SEQ ID NO: 10529 - DNA, 17 bp, synthetic construct
  misc_feature 1..17: note = source = /note="Description of Artificial Sequence: Synthetic oligonucleotide"
  source 1..17: mol_type = other DNA
cgtaggttctggtttcc

SEQ ID NO: 10530 - DNA, 14 bp, synthetic construct
  misc_feature 1..14: note = source = /note="Description of Artificial Sequence: Synthetic oligonucleotide"
  source 1..14: mol_type = other DNA
gggaaaagtaacaa

SEQ ID NO: 10531 - DNA, 14 bp, synthetic construct
  misc_feature 1..14: note = source = /note="Description of Artificial Sequence: Synthetic oligonucleotide"
  source 1..14: mol_type = other DNA
aaatccttggtgtt

SEQ ID NO: 10532 - DNA, 20 bp, synthetic construct
  misc_feature 1..20: note = source = /note="Description of Artificial Sequence: Synthetic oligonucleotide"
  source 1..20: mol_type = other DNA
ctctcatgataggttggcac

SEQ ID NO: 10533 - DNA, 29 bp, synthetic construct
  misc_feature 1..29: note = source = /note="Description of Artificial Sequence: Synthetic oligonucleotide"
  source 1..29: mol_type = other DNA
tttggcataactagcactctcatgatagg

SEQ ID NO: 10534 - DNA, 15 bp, synthetic construct
  misc_feature 1..15: note = source = /note="Description of Artificial Sequence: Synthetic oligonucleotide"
  source 1..15: mol_type = other DNA
ctagcactctcatga

SEQ ID NO: 10535 - DNA, 17 bp, synthetic construct
  misc_feature 1..17: note = source = /note="Description of Artificial Sequence: Synthetic oligonucleotide"
  source 1..17: mol_type = other DNA
cctgtttttgaagaggc

SEQ ID NO: 10536 - DNA, 13 bp, synthetic construct
  misc_feature 1..13: note = source = /note="Description of Artificial Sequence: Synthetic oligonucleotide"
  source 1..13: mol_type = other DNA
atgtttcattcca

SEQ ID NO: 10537 - DNA, 11 bp, synthetic construct
  misc_feature 1..11: note = source = /note="Description of Artificial Sequence: Synthetic oligonucleotide"
  source 1..11: mol_type = other DNA
gatcaactagg

SEQ ID NO: 10538 - DNA, 10 bp, synthetic construct
  misc_feature 1..10: note = source = /note="Description of Artificial Sequence: Synthetic oligonucleotide"
  source 1..10: mol_type = other DNA
tctggatcaa

SEQ ID NO: 10539 - DNA, 16 bp, synthetic construct
  misc_feature 1..16: note = source = /note="Description of Artificial Sequence: Synthetic oligonucleotide"
  source 1..16: mol_type = other DNA
gtacaaaggaggagag

SEQ ID NO: 10540 - DNA, 11 bp, synthetic construct
  misc_feature 1..11: note = source = /note="Description of Artificial Sequence: Synthetic oligonucleotide"
  source 1..11: mol_type = other DNA
agagtacaaag

SEQ ID NO: 10541 - DNA, 12 bp, synthetic construct
  misc_feature 1..12: note = source = /note="Description of Artificial Sequence: Synthetic oligonucleotide"
  source 1..12: mol_type = other DNA
aggtgtcaggta

SEQ ID NO: 10542 - DNA, 20 bp, synthetic construct
  misc_feature 1..20: note = source = /note="Description of Artificial Sequence: Synthetic oligonucleotide"
  source 1..20: mol_type = other DNA
gaacaagggtcaccacagct

SEQ ID NO: 10543 - DNA, 11 bp, synthetic construct
  misc_feature 1..11: note = source = /note="Description of Artificial Sequence: Synthetic oligonucleotide"
  source 1..11: mol_type = other DNA
caccacagcta

SEQ ID NO: 10544 - DNA, 11 bp, synthetic construct
  misc_feature 1..11: note = source = /note="Description of Artificial Sequence: Synthetic oligonucleotide"
  source 1..11: mol_type = other DNA
atagactcaga

SEQ ID NO: 10545 - DNA, 16 bp, synthetic construct
  misc_feature 1..16: note = source = /note="Description of Artificial Sequence: Synthetic oligonucleotide"
  source 1..16: mol_type = other DNA
gaggcacattagccgt

SEQ ID NO: 10546 - DNA, 11 bp, synthetic construct
  misc_feature 1..11: note = source = /note="Description of Artificial Sequence: Synthetic oligonucleotide"
  source 1..11: mol_type = other DNA
taggttctggt

SEQ ID NO: 10547 - DNA, 17 bp, synthetic construct
  misc_feature 1..17: note = source = /note="Description of Artificial Sequence: Synthetic oligonucleotide"
  source 1..17: mol_type = other DNA
cgtaggttctggtttcc

SEQ ID NO: 10548 - DNA, 16 bp, synthetic construct
  misc_feature 1..16: note = source = /note="Description of Artificial Sequence: Synthetic oligonucleotide"
  source 1..16: mol_type = other DNA
tgctcattattaggag

SEQ ID NO: 10549 - DNA, 21 bp, synthetic construct
  misc_feature 1..21: note = source = /note="Description of Artificial Sequence: Synthetic oligonucleotide"
  source 1..21: mol_type = other DNA
tcattattaggaggctatgct

SEQ ID NO: 10550 - DNA, 16 bp, synthetic construct
  misc_feature 1..16: note = source = /note="Description of Artificial Sequence: Synthetic oligonucleotide"
  source 1..16: mol_type = other DNA
tcattattaggaggct

SEQ ID NO: 10551 - DNA, 21 bp, synthetic construct
  misc_feature 1..21: note = source = /note="Description of Artificial Sequence: Synthetic oligonucleotide"
  source 1..21: mol_type = other DNA
gaagaatttgcctctgataga

SEQ ID NO: 10552 - DNA, 13 bp, synthetic construct
  misc_feature 1..13: note = source = /note="Description of Artificial Sequence: Synthetic oligonucleotide"
  source 1..13: mol_type = other DNA
cctctgatagagc

SEQ ID NO: 10553 - DNA, 18 bp, synthetic construct
  misc_feature 1..18: note = source = /note="Description of Artificial Sequence: Synthetic oligonucleotide"
  source 1..18: mol_type = other DNA
gatagagcatgggttctg

SEQ ID NO: 10554 - DNA, 12 bp, synthetic construct
  misc_feature 1..12: note = source = /note="Description of Artificial Sequence: Synthetic oligonucleotide"
  source 1..12: mol_type = other DNA
ggaggcagtggt

SEQ ID NO: 10555 - DNA, 2000 bp, synthetic construct
  misc_difference 1..2000: note = misc_feature - /note="This sequence may encompass 50-2000 nucleotides"
  misc_feature 1..2000: note = source = /note="Description of Artificial Sequence: Synthetic polynucleotide"
  source 1..2000: mol_type = other DNA
aaaaaaaaaaaaaaaaaaaaaaaaaaaaaaaaaaaaaaaaaaaaaaaaaaaaaaaaaaaaaaaaaaaaaaaaaaaaaaaaaaaaaaaaaaaaaaaaaaaaaaaaaaaaaaaaaaaaaaaaaaaaaaaaaaaaaaaaaaaaaaaaaaaaaaaaaaaaaaaaaaaaaaaaaaaaaaaaaaaaaaaaaaaaaaaaaaaaaaaaaaaaaaaaaaaaaaaaaaaaaaaaaaaaaaaaaaaaaaaaaaaaaaaaaaaaaaaaaaaaaaaaaaaaaaaaaaaaaaaaaaaaaaaaaaaaaaaaaaaaaaaaaaaaaaaaaaaaaaaaaaaaaaaaaaaaaaaaaaaaaaaaaaaaaaaaaaaaaaaaaaaaaaaaaaaaaaaaaaaaaaaaaaaaaaaaaaaaaaaaaaaaaaaaaaaaaaaaaaaaaaaaaaaaaaaaaaaaaaaaaaaaaaaaaaaaaaaaaaaaaaaaaaaaaaaaaaaaaaaaaaaaaaaaaaaaaaaaaaaaaaaaaaaaaaaaaaaaaaaaaaaaaaaaaaaaaaaaaaaaaaaaaaaaaaaaaaaaaaaaaaaaaaaaaaaaaaaaaaaaaaaaaaaaaaaaaaaaaaaaaaaaaaaaaaaaaaaaaaaaaaaaaaaaaaaaaaaaaaaaaaaaaaaaaaaaaaaaaaaaaaaaaaaaaaaaaaaaaaaaaaaaaaaaaaaaaaaaaaaaaaaaaaaaaaaaaaaaaaaaaaaaaaaaaaaaaaaaaaaaaaaaaaaaaaaaaaaaaaaaaaaaaaaaaaaaaaaaaaaaaaaaaaaaaaaaaaaaaaaaaaaaaaaaaaaaaaaaaaaaaaaaaaaaaaaaaaaaaaaaaaaaaaaaaaaaaaaaaaaaaaaaaaaaaaaaaaaaaaaaaaaaaaaaaaaaaaaaaaaaaaaaaaaaaaaaaaaaaaaaaaaaaaaaaaaaaaaaaaaaaaaaaaaaaaaaaaaaaaaaaaaaaaaaaaaaaaaaaaaaaaaaaaaaaaaaaaaaaaaaaaaaaaaaaaaaaaaaaaaaaaaaaaaaaaaaaaaaaaaaaaaaaaaaaaaaaaaaaaaaaaaaaaaaaaaaaaaaaaaaaaaaaaaaaaaaaaaaaaaaaaaaaaaaaaaaaaaaaaaaaaaaaaaaaaaaaaaaaaaaaaaaaaaaaaaaaaaaaaaaaaaaaaaaaaaaaaaaaaaaaaaaaaaaaaaaaaaaaaaaaaaaaaaaaaaaaaaaaaaaaaaaaaaaaaaaaaaaaaaaaaaaaaaaaaaaaaaaaaaaaaaaaaaaaaaaaaaaaaaaaaaaaaaaaaaaaaaaaaaaaaaaaaaaaaaaaaaaaaaaaaaaaaaaaaaaaaaaaaaaaaaaaaaaaaaaaaaaaaaaaaaaaaaaaaaaaaaaaaaaaaaaaaaaaaaaaaaaaaaaaaaaaaaaaaaaaaaaaaaaaaaaaaaaaaaaaaaaaaaaaaaaaaaaaaaaaaaaaaaaaaaaaaaaaaaaaaaaaaaaaaaaaaaaaaaaaaaaaaaaaaaaaaaaaaaaaaaaaaaaaaaaaaaaaaaaaaaaaaaaaaaaaaaaaaaaaaaaaaaaaaaaaaaaaaaaaaaaaaaaaaaaaaaaaaaaaaaaaaaaaaaaaaaaaaaaaaaaaaaaaaaaaaaaaaaaaaaaaaaaaaaaaaaaaaaaaaaaaaaaaaaaaaaaaaaaaaaaaaaaaaaaaaaaaaaaaaaaaaaaaaaaaaaaaaaaaaaaaaaaaaaaaaaaaaaaaaaaaaaaaaaaaaaaaaaaaaaaaaaaaaaaaaaaaaaaaaaaaaaaaaaaaaaaaaaaaaaaaaaaaaaaaaaaaaaaaaaaaaaaaaaaaaaaaaaaaaaaaaaaaaaaaaaaaaaaaaaaaaaaaaaaaaaaaaaaaaaaaaaaaaaaaaaaaaaaaaaaaaaaaaaaaaaaaaaaaaaaaaaaaaaaaaaaaaaaaaaaaaaaaaaaaaaaaaaaaaaaaaaaaaaaaaaaaaaaaaaaaaaaaaaaaaaaaaaaaaaaaaaa

SEQ ID NO: 10556 - protein, 4 aa, synthetic construct
  REGION 1..4: note = source = /note="Description of Artificial Sequence: Synthetic peptide"
RGDS

SEQ ID NO: 10557 - DNA, 127 bp, synthetic construct
  misc_feature 1..127: note = source = /note="Description of Artificial Sequence: Synthetic polynucleotide"
  source 1..127: mol_type = other DNA
ccagaccatatcagcagcatctcatgttgaggagcagaacactggaatttagtagcattcggttagagtaatatgttgtctgcaggtttcactggacagcaatattttcatgaatgaattcctgttg

SEQ ID NO: 10558 - DNA, 13 bp, synthetic construct
  misc_feature 1..13: note = source = /note="Description of Artificial Sequence: Synthetic oligonucleotide"
  source 1..13: mol_type = other DNA
aaccggtgcctag

SEQ ID NO: 10559 - DNA, 134 bp, synthetic construct
  misc_feature 1..134: note = source = /note="Description of Artificial Sequence: Synthetic polynucleotide"
  source 1..134: mol_type = other DNA
atgaaaggggaacgcagaagaggcaaaggccacgacggactgtaccagggactcagcaccgccaccaaggacacctatgacgctcttcacatgcaggccctgccgcctcggtaagtcgacgcctcgactgtgcc

SEQ ID NO: 10560 - DNA, 21 bp, synthetic construct
  misc_feature 1..21: note = source = /note="Description of Artificial Sequence: Synthetic oligonucleotide"
  source 1..21: mol_type = other DNA
gaagaagctggtgtgaagttt

SEQ ID NO: 10561 - protein, 30 aa, synthetic construct
  VARIANT 1..30: note = MISC_FEATURE - /note="This sequence may encompass 1-6 'Gly Gly Gly Gly Ser' repeating units"
  REGION 1..30: note = source = /note="Description of Artificial Sequence: Synthetic polypeptide"
  REGION 1..30: note = source = /note="See specification as filed for detailed description of substitutions and preferred embodiments"
GGGGSGGGGSGGGGSGGGGSGGGGSGGGGS

SEQ ID NO: 10562 - RNA, 36 nt, synthetic construct; identical to SEQ ID NO: 66
  misc_difference 1..20: note = modified_base - a, c, u, g, unknown or other
  misc_feature 1..36: note = source = /note="Description of Artificial Sequence: Synthetic oligonucleotide"
  source 1..36: mol_type = other RNA

SEQ ID NO: 10563 - RNA, 100 nt, synthetic construct; identical to SEQ ID NO: 69
  misc_difference 1..20: note = modified_base - a, c, u, g, unknown or other
  misc_feature 1..100: note = source = /note="Description of Artificial Sequence: Synthetic polynucleotide"
  source 1..100: mol_type = other RNA

1-178. (canceled)

179. A gRNA molecule comprising a tracr and a crRNA, wherein the crRNA comprises a targeting domain that is complementary with a target sequence selected from a TET2 intron and a TET2 intron-exon junction, wherein the targeting domain is complementary to a target sequence within a genomic region selected from chr4: 105146980-105190359; chr4: 105190506-105233896; chr4: 105237352-105241338; chr4: 105241430-105242833; chr4: 105242928-105243569; chr4: 105243779-105259618; chr4: 105259770-105261758; chr4: 105261849-105269609; and chr4: 105272919-105275047, and wherein the location of the sequence within the genomic region is according to an alignment with the human reference genome hg38.

180. The gRNA molecule of claim 179, wherein the gRNA molecule comprises one or more nucleic acid molecules, wherein the one or more nucleic acid molecules comprises:
(a) one or more phosphorothioate modification(s) at 3′ end of said nucleic acid molecule or molecules;
(b) one or more phosphorothioate modification(s) at the 5′ end of said nucleic acid molecule or molecules;
(c) one or more 2′-O-methyl modification(s) at 3′ end of said nucleic acid molecule or molecules;
(d) one or more 2′-O-methyl modification(s) at the 5′ end of said nucleic acid molecule or molecules;
(e) a 2′ O-methyl modification at each of the 4^{th}-to-terminal, 3^{rd}-to-terminal, and 2^{nd}-to-terminal 3′ residues of said nucleic acid molecule or molecules; or
(f) any combination thereof.

181. A method of reducing or eliminating the expression of at least one isoform of TET2, or a function of TET2 in a cell, wherein the method comprises introducing into the cell: (i) a Cas9 molecule or a nucleic acid encoding a Cas9 molecule, and (ii) a gRNA molecule of claim 179 or a nucleic acid encoding the gRNA molecule of claim 179.

182. A composition comprising a gRNA molecule of claim 179 or a nucleic acid sequence encoding the gRNA molecule, and a Cas9 molecule or a nucleic acid encoding a Cas9 molecule.

183. The composition of claim 182, further comprising a template nucleic acid.

184. The composition of claim 183, wherein the template nucleic acid comprises a 5′ homology arm and/or a 3′ homology arm, wherein at least one of the homology arms comprises sequence homologous to a sequence of a TET2 intron, and wherein the template nucleic acid further comprises a nucleic acid sequence encoding a chimeric antigen receptor (CAR).

185. A nucleic acid that encodes a gRNA molecule of claim 179.

186. A vector comprising the nucleic acid of claim 185, wherein the vector is selected from the group consisting of a lentiviral vector, an adenoviral vector, an adeno-associated viral (AAV) vector, a herpes simplex virus (HSV) vector, a plasmid, a minicircle, a nanoplasmid, and an RNA vector.

187. A method of altering a target sequence of a cell, comprising contacting said cell with:
(a) a gRNA molecule of claim 179 and a Cas9 molecule;
(b) a gRNA molecule of claim 179 and a nucleic acid encoding a Cas9 molecule;
(c) a nucleic acid encoding a gRNA molecule of claim 179 and a Cas9 molecule;
(d) a nucleic acid encoding a gRNA molecule of claim 179 and a nucleic acid encoding a Cas9 molecule;
(e) any one of a) to d), above, and a template nucleic acid encoding a CAR;
(f) the composition of claim 182; or
(g) the vector of claim 186.

188. A method of engineering a cell to express a chimeric antigen receptor (CAR), comprising:
(a) introducing into said cell a CRISPR system comprising a gRNA molecule of claim 179 or a nucleic acid sequence encoding the gRNA molecule of claim 179 and a Cas9 molecule or a nucleic acid sequence encoding a Cas9 molecule; and
(b) introducing into said cell a template nucleic acid comprising nucleic acid sequence encoding a CAR;
wherein said nucleic acid sequence encoding a CAR is integrated into the genome.

189. The method of claim 187, wherein the cell is an immune effector cell or a population of immune effector cells.

190. A cell, comprising an indel at or near a target sequence of the gRNA of claim 179.

191. The cell of claim 190, wherein the cell comprises nucleic acid sequence encoding a chimeric antigen receptor (CAR) integrated into the genome at or near a TET2 intron or intron-exon junction.

192. A method of treatment, comprising administering the cell of claim 191 to a subject in need thereof, wherein the subject has a proliferative disease, a precancerous condition, a cancer, or a non-cancer related indication associated with expression of a tumor antigen, wherein the cancer is selected from colon cancer, rectal cancer, renal-cell carcinoma, liver cancer, non-small cell carcinoma of the lung, cancer of the small intestine, cancer of the esophagus, melanoma, bone cancer, pancreatic cancer, skin cancer, cancer of the head or neck, cutaneous or intraocular malignant melanoma, uterine cancer, ovarian cancer, rectal cancer, cancer of the anal region, stomach cancer, testicular cancer, carcinoma of the fallopian tubes, carcinoma of the endometrium, carcinoma of the cervix, carcinoma of the vagina, carcinoma of the vulva, Hodgkin's Disease, non-Hodgkin's lymphoma, cancer of the endocrine system, cancer of the thyroid gland, cancer of the parathyroid gland, cancer of the adrenal gland, sarcoma of soft tissue, cancer of the urethra, cancer of the penis, solid tumors of childhood, cancer of the bladder, cancer of the kidney or ureter, carcinoma of the renal pelvis, neoplasm of the central nervous system (CNS), primary CNS lymphoma, tumor angiogenesis, spinal axis tumor, brain stem glioma, pituitary adenoma, Kaposi's sarcoma, epidermoid cancer, squamous cell cancer, T-cell lymphoma, environmentally induced cancers, chronic lymphocytic leukemia (CLL), acute leukemias, acute lymphoid leukemia (ALL), pediatric acute lymphoid leukemia, B-cell acute lymphoid leukemia (B-ALL), T-cell acute lymphoid leukemia (T-ALL), chronic myelogenous leukemia (CML), acute myeloid leukemia (AML), B cell prolymphocytic leukemia, blastic plasmacytoid dendritic cell neoplasm, Burkitt's lymphoma, diffuse large B cell lymphoma, follicular lymphoma, hairy cell leukemia, small cell- or a large cell-follicular lymphoma, malignant lymphoproliferative conditions, MALT lymphoma, mantle cell lymphoma, marginal zone lymphoma, multiple myeloma, myelodysplasia and myelodysplastic syndrome, Hodgkin's lymphoma, plasmablastic lymphoma, plasmacytoid dendritic cell neoplasm, Waldenstrom macroglobulinemia, pre-leukemia, combinations of said cancers, and metastatic lesions of said cancers.
